(19) United States
(12) Patent Application Publication
(10) Pub. No.: US 2007/0219347 A1
(43) Pub. Date: Sep. 20, 2007

(54) Neisseria genomic sequences and methods of their use

(76) Inventors: Claire Marie Fraser, Potomac, MD (US); Erin Kathleen Hickey, Palatine, IL (US); Jeremy D. Peterson, Arlington, VA (US); Herve Tettelin, Gaithersburg, MD (US); J. Craig Venter, Potomac, MD (US); Vega Masignani, Siena (IT); Cesira Galeotti, Siena (IT); Marirosa Mora, Siena (IT); Giulio Ratti, Siena (IT); Maria Scarselli, Siena (IT); Vincenzo Scarlato, Colle di Val d'Elsa (IT); Rino Rappuoli, Siena (IT); Mariagrazia Pizza, Siena (IT); Guido Grandi, Milan (IT)

Correspondence Address: NOVARTIS VACCINES AND DIAGNOSTICS INC., CORPORATE INTELLECTUAL PROPERTY R338, P.O. BOX 8097, Emeryville, CA, 94662-8097, US

(21) Appl. No.: 11/711,740

(22) Filed: Feb. 26, 2007

Related U.S. Application Data
(62) Division of application No. 10/018,470, filed on Nov. 21, 2002.
(60) Provisional application No. 60/132,068, filed on Apr. 30, 1999.

(30) Foreign Application Priority Data
Feb. 28, 2000 (GB) 0004695.3
Oct. 8, 1999 (US) PCT/US99/23573

(51) Int. Cl. C07K 14/22; C07H 21/04; C07K 16/12; C07K 4/04; C07K 7/00

(52) U.S. Cl. 530/324; 530/325; 530/326; 530/327; 530/328; 530/329; 530/350; 530/387.1; 536/23.1

(57) ABSTRACT

The invention provides methods of obtaining immunogenic proteins from genomic sequences including Neisseria, including the amino acid sequences and the corresponding nucleotide sequences, as well as the genomic sequence of Neisseria meningitidis B. The proteins so obtained are useful antigens for vaccines, immunogenic compositions, and/or diagnostics

### RELATED APPLICATIONS

[0001] This application is a divisional of application Ser. No. 10/018,470 ('470), which is the U.S. National Phase of PCT/US00/05928, filed 8 Mar. 2000, which claims benefit to provisional U.S. application Ser. No. 60/132,068, filed 30 Apr. 1999; and priority to PCT/US99/23573, filed 8 Oct. 1999; and Great Britain application serial no. GB-0004695.3, filed 28 Feb. 2000. The above applications are herein incorporated in their entirety by reference.

### INCORPORATION BY REFERENCE OF MATERIAL ON COMPACT DISC

[0002] This application hereby incorporates by reference a sequence listing on a compact disc (CD-R) accompanied by two (2) copies (labeled Copy 1 and Copy 2) formatted from an IBM-PC Compatible computer, compatible with MS-Windows. The compact disc contains the following file: SEQLIST_PP000365.352.doc, containing 5 MB, created on Jan. 11, 2007.

[0003] This application hereby incorporates by reference Appendix A and Appendix B on a compact disc (CD-R) in duplicate formatted from an IBM-PC Compatible computer, compatible with MS-Windows. The compact disc contains the following files: AppendixA_PP000365.352.doc, containing 3 MB, created on Feb. 8, 2007; and AppendixB_PP000365.352.doc, containing 252 KB, created on Feb. 8, 2007.

### FIELD OF INVENTION

[0004] This invention relates to methods of obtaining antigens and immunogens, the antigens and immunogens so obtained, and nucleic acids from the bacterial species: Neisseria meningitidis. In particular, it relates to genomic sequences from the bacterium; more particularly its “B” serogroup.

### BACKGROUND

[0005] Neisseria meningitidis is a non-motile, gram negative diplococcus human pathogen. It colonizes the pharynx, causing meningitis and, occasionally, septicaemia in the absence of meningitis. It is closely related to N. gonorrhoea, although one feature that clearly differentiates meningococcus from gonococcus is the presence of a polysaccharide capsule that is present in all pathogenic meningococci.

[0006] N. meningitidis causes both endemic and epidemic disease. In the United States the attack rate is 0.6-1 per 100,000 persons per year, and it can be much greater during outbreaks. (see Lieberman et al. (1996) Safety and Immunogenicity of a Serogroups A/C Neisseria meningitidis Oligosaccharide-Protein Conjugate Vaccine in Young Children. JAMA 275(19):1499-1503; Schuchat et al (1997) Bacterial Meningitis in the United States in 1995. N Engl J Med 337(14):970-976). In developing countries, endemic disease rates are much higher and during epidemics incidence rates can reach 500 cases per 100,000 persons per year. Mortality is extremely high, at 10-20% in the United States, and much higher in developing countries. Following the introduction of the conjugate vaccine against Haemophilus influenzae, N. meningitidis is the major cause of bacterial meningitis at all ages in the United States (Schuchat et al (1997) supra).

[0007] Based on the organism's capsular polysaccharide, 12 serogroups of N. meningitidis have been identified. Group A is the pathogen most often implicated in epidemic disease in sub-Saharan Africa. Serogroups B and C are responsible for the vast majority of cases in the United States and in most developed countries. Serogroups W135 and Y are responsible for the rest of the cases in the United States and developed countries. The meningococcal vaccine currently in use is a tetravalent polysaccharide vaccine composed of serogroups A, C, Y and W135. Although efficacious in adolescents and adults, it induces a poor immune response and short duration of protection, and cannot be used in infants (e.g., Morbidity and Mortality weekly report, Vol. 46, No. RR-5 (1997)). This is because polysaccharides are T-cell independent antigens that induce a weak immune response that cannot be boosted by repeated immunization. Following the success of the vaccination against H. influenzae, conjugate vaccines against serogroups A and C have been developed and are at the final stage of clinical testing (Zollinger W D “New and Improved Vaccines Against Meningococcal Disease”. In: New Generation Vaccines, supra, pp. 469-488; Lieberman et al (1996) supra; Costantino et al (1992) Development and phase I clinical testing of a conjugate vaccine against meningococcus A (menA) and C (menC) (Vaccine 10:691-698)).

[0008] Meningococcus B (MenB) remains a problem, however. This serotype currently is responsible for approximately 50% of total meningitis in the United States, Europe, and South America. The polysaccharide approach cannot be used because the MenB capsular polysaccharide is a polymer of α(2-8)-linked N-acetyl neuraminic acid that is also present in mammalian tissue. This results in tolerance to the antigen; indeed, if an immune response were elicited, it would be anti-self, and therefore undesirable. In order to avoid induction of autoimmunity and to induce a protective immune response, the capsular polysaccharide has, for instance, been chemically modified substituting the N-acetyl groups with N-propionyl groups, leaving the specific antigenicity unaltered (Romero & Outschoorn (1994) Current status of Meningococcal group B vaccine candidates: capsular or non-capsular? Clin Microbiol Rev 7(4):559-575).

[0009] Alternative approaches to MenB vaccines have used complex mixtures of outer membrane proteins (OMPs), containing either the OMPs alone, or OMPs enriched in porins, or deleted of the class 4 OMPs that are believed to induce antibodies that block bactericidal activity. This approach produces vaccines that are not well characterized. They are able to protect against the homologous strain, but are not effective at large where there are many antigenic variants of the outer membrane proteins. To overcome the antigenic variability, multivalent vaccines containing up to nine different porins have been constructed (e.g., Poolman J T (1992) Development of a meningococcal vaccine. Infect. Agents Dis. 4:13-28). Additional proteins to be used in outer membrane vaccines have been the opa and opc proteins, but none of these approaches have been able to overcome the antigenic variability (e.g., Ala'Aldeen & Borriello (1996) The meningococcal transferrin-binding proteins 1 and 2 are both surface exposed and generate bactericidal antibodies capable of killing homologous and heterologous strains. Vaccine 14(1):49-53).

[0010] A certain amount of sequence data is available for meningococcal and gonococcal genes and proteins (e.g., EP-A-0467714, WO96/29412), but this is by no means complete. The provision of further sequences could provide an opportunity to identify secreted or surface-exposed proteins that are presumed targets for the immune system and which are not antigenically variable or at least are more antigenically conserved than other and more variable regions. Thus, those antigenic sequences that are more highly conserved are preferred sequences. Those sequences specific to Neisseria meningitidis or Neisseria gonorrhoeae that are more highly conserved are further preferred sequences. For instance, some of the identified proteins could be components of efficacious vaccines against meningococcus B, some could be components of vaccines against all meningococcal serotypes, and others could be components of vaccines against all pathogenic Neisseriae. The identification of sequences from the bacterium will also facilitate the production of biological probes, particularly organism-specific probes.

[0011] It is thus an object of the invention is to provide Neisserial DNA sequences which (1) encode proteins predicted and/or shown to be antigenic or immunogenic, (2) can be used as probes or amplification primers, and (3) can be analyzed by bioinforrnatics.

### BRIEF DESCRIPTION OF THE DRAWINGS

[0012] FIGS. 1A-1E illustrate the products of protein expression and purification of the predicted ORF 919 as cloned and expressed in E. coli.

[0013] FIGS. 2A-2E illustrate the products of protein expression and purification of the predicted ORF 279 as cloned and expressed in E. coli.

[0014] FIGS. 3A-3E illustrate the products of protein expression and purification of the predicted ORF 576-1 as cloned and expressed in E. coli.

[0015] FIGS. 4A-4E illustrate the products of protein expression and purification of the predicted ORF 519-1 as cloned and expressed in E. coli.

[0016] FIGS. 5A-5E illustrate the products of protein expression and purification of the predicted ORF 121-1 as cloned and expressed in E. coli.

[0017] FIGS. 6A-6E illustrate the products of protein expression and purification of the predicted ORF 128-1 as cloned and expressed in E. coli.

[0018] FIGS. 7A-7E illustrate illustrates the products of protein expression and purification of the predicted ORF 206 as cloned and expressed in E. coli.

[0019] FIGS. 8A-8D illustrate the products of protein expression and purification of the predicted ORF 287 as cloned and expressed in E. coli.

[0020] FIGS. 9A-9E illustrate the products of protein expression and purification of the predicted ORF 406 as cloned and expressed in E. coli.

[0021] FIG. 10 illustrates the hydrophilicity plot, antigenic index and AMPHI regions of the products of protein expression the predicted ORF 919 as cloned and expressed in E. coli.

[0022] FIG. 11 illustrates the hydrophilicity plot, antigenic index and AMPHI regions of the products of protein expression the predicted ORF 279 as cloned and expressed in E. coli.

[0023] FIG. 12 illustrates the hydrophilicity plot, antigenic index and AMPHI regions of the products of protein expression the predicted ORF 576-1 as cloned and expressed in E. coli.

[0024] FIG. 13 illustrates the hydrophilicity plot, antigenic index and AMPHI regions of the products of protein expression the predicted ORF 519-1 as cloned and expressed in E. coli.

[0025] FIG. 14 illustrates the hydrophilicity plot, antigenic index and AMPHI regions of the products of protein expression the predicted ORF 121-1 as cloned and expressed in E. coli.

[0026] FIG. 15 illustrates the hydrophilicity plot, antigenic index and AMPHI regions of the products of protein expression the predicted ORF 128-1 as cloned and expressed in E. coli.

[0027] FIG. 16 illustrates the hydrophilicity plot, antigenic index and AMPHI regions of the products of protein expression the predicted ORF 206 as cloned and expressed in E. coli.

[0028] FIG. 17 illustrates the hydrophilicity plot, antigenic index and AMPHI regions of the products of protein expression the predicted ORF 287 as cloned and expressed in E. coli.

[0029] FIG. 18 illustrates the hydrophilicity plot, antigenic index and AMPHI regions of the products of protein expression the predicted ORF 406 as cloned and expressed in E. coli.

### THE INVENTION

[0030] The first complete sequence of the genome of N. meningitidis was disclosed as 961 partial contiguous nucleotide sequences, shown as SEQ ID NOs:1-961 of co-owned PCT/US99/23573 (the '573 application), filed 8 Oct. 1999 (to be published April 2000). A single sequence full length genome of N. meningitidis was also disclosed as SEQ ID NO. 1068 of the '573 application. The invention is based on a full length genome of N. meningitidis which appears as SEQ ID NO.1 in the present application as Appendix A hereto. The 961 sequences of the '573 application represent substantially the whole genome of serotype B of N. meningitidis (>99.98%). There is partial overlap between some of the 961 contiguous sequences (“contigs”) shown in the 961 sequences, which overlap was used to construct the single full length sequence shown in SEQ ID NO. 1 in Appendix A hereto, using the TIGR Assembler [G. S. Sutton et al., TIGR Assembler: A New Tool for Assembling Large Shotgun Sequencing Projects, Genome Science and Technology, 1:9-19 (1995)]. Some of the nucleotides in the contigs had been previously released. (available at 11ftp.tigr.org/pub/data/n_meningitidis on the world-wide web or “WWW”). The coordinates of the 2508 released sequences in the present contigs are presented in Appendix A of the '573 application. These data include the contig number (or i.d.) as presented in the first column; the name of the sequence as found on WWW is in the second column; with the coordinates of the contigs in the third and fourth columns, respectively. The sequences of certain MenB ORFs presented in Appendix B of the '573 application feature in International Patent Application filed by Chiron SpA on Oct. 9, 1998 (PCT/IB98/01665) and Jan. 14, 1999 (PCT/IB99/00103) respectively. Appendix B hereto provides a listing of 2158 open reading frames contained within the full length sequence found in SEQ ID NO. 1 in Appendix A hereto. The information set forth in Appendix B hereto includes the “NMB” name of the sequence, the putative translation product, and the beginning and ending nucleotide positions within SEQ ID NO. 1 which comprise the open reading frames. These open reading frames are referred to herein as the “NMB open reading frames”.

[0031] In a first aspect, the invention provides nucleic acid including the N. meningitidis nucleotide sequence shown in SEQ ID NO. 1 in Appendix A hereto. It also provides nucleic acid comprising sequences having sequence identity to the nucleotide sequence disclosed herein. Depending on the particular sequence, the degree of sequence identity is preferably greater than 50% (e.g., 60%, 70%, 80%, 90%, 95%, 99% or more). These sequences include, for instance, mutants and allelic variants. The degree of sequence identity cited herein is determined across the length of the sequence determined by the Smith-Waterman homology search algorithm as implemented in MPSRCH program (Oxford Molecular) using an affine gap search with the following parameters: gap open penalty 12, gap extension penalty 1.

[0032] The invention also provides nucleic acid including a fragment of one or more of the nucleotide sequences set out herein, including the NMB open reading frames shown in Appendix B hereto. The fragment should comprise at least n consecutive nucleotides from the sequences and, depending on the particular sequence, n is 10 or more (e.g., 11, 12, 13, 14, 15, 16, 17, 18, 19, 20, 21, 22, 23, 24, 25, 30, 35, 40, 45, 50, 60, 75, 100 or more). Preferably, the fragment is unique to the genome of N. meningitidis, that is to say it is not present in the genome of another organism. More preferably, the fragment is unique to the genome of strain B of N. meningitidis. The invention also provides nucleic acid that hybridizes to those provided herein. Conditions for hybridizing are disclosed herein.

[0033] The invention also provides nucleic acid including sequences complementary to those described above (e.g., for antisense, for probes, or for amplification primers).

[0034] Nucleic acid according to the invention can, of course, be prepared in many ways (e.g., by chemical synthesis, from DNA libraries, from the organism itself, etc.) and can take various forms (e.g., single-stranded, double-stranded, vectors, probes, primers, etc.). The term “nucleic acid” includes DNA and RNA, and also their analogs, such as those containing modified backbones, and also peptide nucleic acid (PNA) etc.

[0035] It will be appreciated that, as SEQ ID NOs:1-961 of the '573 application represent the substantially complete genome of the organism, with partial overlap, references to SEQ ID NOs:1-961 of the '573 application include within their scope references to the complete genomic sequence, that is, SEQ ID NO. 1 hereof. For example, where two SEQ ID NOs overlap, the invention encompasses the single sequence which is formed by assembling the two overlapping sequences, which full sequence will be found in SEQ ID NO. 1 hereof. Thus, for instance, a nucleotide sequence which bridges two SEQ ID NOs but is not present in its entirety in either SEQ ID NO is still within the scope of the invention. Such a sequence will be present in its entirety in the single full length sequence of SEQ ID NO. 1 of the present application.

[0036] The invention also provides vectors including nucleotide sequences of the invention (e.g., expression vectors, sequencing vectors, cloning vectors, etc.) and host cells transformed with such vectors.

[0037] According to a further aspect, the invention provides a protein including an amino acid sequence encoded within a N. meningitidis nucleotide sequence set out herein. It also provides proteins comprising sequences having sequence identity to those proteins. Depending on the particular sequence, the degree of sequence identity is preferably greater than 50% (e.g., 60%, 70%, 80%, 90%, 95%, 99% or more). Sequence identity is determined as above disclosed. These homologous proteins include mutants and allelic variants, encoded within the N. meningitidis nucleotide sequence set out herein.

[0038] The invention further provides proteins including fragments of an amino acid sequence encoded within a N. meningitidis nucleotide sequence set out in the sequence listing. The fragments should comprise at least n consecutive amino acids from the sequences and, depending on the particular sequence, n is 7 or more (e.g., 8, 10, 12, 14, 16, 18, 20 or more). Preferably the fragments comprise an epitope from the sequence.

[0039] The proteins of the invention can, of course, be prepared by various means (e.g., recombinant expression, purification from cell culture, chemical synthesis, etc.) and in various forms (e.g. native, fusions etc.). They are preferably prepared in substantially isolated form (i.e., substantially free from other N. meningitidis host cell proteins).

[0040] Various tests can be used to assess the in vivo immunogenicity of the proteins of the invention. For example, the proteins can be expressed recombinantly or chemically synthesized and used to screen patient sera by immunoblot. A positive reaction between the protein and patient serum indicates that the patient has previously mounted an immune response to the protein in question; i.e., the protein is an immunogen. This method can also be used to identify immunodominant proteins.

[0041] The invention also provides nucleic acid encoding a protein of the invention.

[0042] In a further aspect, the invention provides a computer, a computer memory, a computer storage medium (e.g., floppy disk, fixed disk, CD-ROM, etc.), and/or a computer database containing the nucleotide sequence of nucleic acid according to the invention. Preferably, it contains one or more of the N. meningitidis nucleotide sequences set out herein.

[0043] This may be used in the analysis of the N. meningitidis nucleotide sequences set out herein. For instance, it may be used in a search to identify open reading frames (ORFs) or coding sequences within the sequences.

[0044] In a further aspect, the invention provides a method for identifying an amino acid sequence, comprising the step of searching for putative open reading frames or protein-coding sequences within a N. meningitidis nucleotide sequence set out herein. Similarly, the invention provides the use of a N. meningitidis nucleotide sequence set out herein in a search for putative open reading frames or protein-coding sequences.

[0045] Open-reading frame or protein-coding sequence analysis is generally performed on a computer using standard bioinformatic techniques. Typical algorithms or program used in the analysis include ORFFINDER (NCBI), GENMARK [Borodovsky & McIninch (1993) Computers Chem 17:122-133], and GLIMMER [Salzberg et al. (1998) Nucl Acids Res 26:544-548].

[0046] A search for an open reading frame or protein-coding sequence may comprise the steps of searching a N. meningitidis nucleotide sequence set out herein for an initiation codon and searching the upstream sequence for an in-frame termination codon. The intervening codons represent a putative protein-coding sequence. Typically, all six possible reading frames of a sequence will be searched.

[0047] An amino acid sequence identified in this way can be expressed using any suitable system to give a protein. This protein can be used to raise antibodies which recognize epitopes within the identified amino acid sequence. These antibodies can be used to screen N. meningitidis to detect the presence of a protein comprising the identified amino acid sequence.

[0048] Furthermore, once an ORF or protein-coding sequence is identified, the sequence can be compared with sequence databases. Sequence analysis tools can be found at NCBI (available at www.ncbi.nlm.nih.gov) e.g., the algorithms BLAST, BLAST2, BLASTn, BLASTp, tBLASTn, BLASTx, & tBLASTx [see also Altschul et al. (1997) Gapped BLAST and PSI-BLAST: new generation of protein database search programs. Nucleic Acids Research 25:2289-3402]. Suitable databases for comparison include the nonredundant GenBank, EMBL, DDBJ and PDB sequences, and the nonredundant GenBank CDS translations, PDB, SwissProt, Spupdate and PIR sequences. This comparison may give an indication of the function of a protein.

[0049] Hydrophobic domains in an amino acid sequence can be predicted using algorithms such as those based on the statistical studies of Esposti et al. [Critical evaluation of the hydropathy of membrane proteins (1990) Eur J Biochem 190:207-219]. Hydrophobic domains represent potential transmembrane regions or hydrophobic leader sequences, which suggest that the proteins may be secreted or be surface-located. These properties are typically representative of good immunogens.

[0050] Similarly, transmembrane domains or leader sequences can be predicted using the PSORT algorithm (available at www.psort.nibb.ac.jp), and functional domains can be predicted using the MOTIFS program (GCG Wisconsin & PROSITE).

[0051] The invention also provides nucleic acid including an open reading frame or protein-coding sequence present in a N. meningitidis nucleotide sequence set out herein. Furthermore, the invention provides a protein including the amino acid sequence encoded by this open reading frame or protein-coding sequence.

[0052] According to a further aspect, the invention provides antibodies which bind to these proteins. These may be polyclonal or monoclonal and may be produced by any suitable means known to those skilled in the art.

[0053] The antibodies of the invention can be used in a variety of ways, e.g., for confirmation that a protein is expressed, or to confirm where a protein is expressed. Labeled antibody (e.g., fluorescent labeling for FACS) can be incubated with intact bacteria and the presence of label on the bacterial surface confirms the location of the protein, for instance.

[0054] According to a further aspect, the invention provides compositions including protein, antibody, and/or nucleic acid according to the invention. These compositions may be suitable as vaccines, as immunogenic compositions, or as diagnostic reagents.

[0055] The invention also provides nucleic acid, protein, or antibody according to the invention for use as medicaments (e.g., as vaccines) or as diagnostic reagents. It also provides the use of nucleic acid, protein, or antibody according to the invention in the manufacture of (I) a medicament for treating or preventing infection due to Neisserial bacteria (ii) a diagnostic reagent for detecting the presence of Neisserial bacteria or of antibodies raised against Neisserial bacteria. Said Neisserial bacteria may be any species or strain (such as N. gonorrhoeae) but are preferably N. meningitidis, especially strain A, strain B or strain C.

[0056] In still yet another aspect, the present invention provides for compositions including proteins, nucleic acid molecules, or antibodies. More preferable aspects of the present invention are drawn to immunogenic compositions of proteins. Further preferable aspects of the present invention contemplate pharmaceutical immunogenic compositions of proteins or vaccines and the use thereof in the manufacture of a medicament for the treatment or prevention of infection due to Neisserial bacteria, preferably infection of MenB.

[0057] The invention also provides a method of treating a patient, comprising administering to the patient a therapeutically effective amount of nucleic acid, protein, and/or antibody according to the invention.

[0058] According to further aspects, the invention provides various processes.

[0059] A process for producing proteins of the invention is provided, comprising the step of culturing a host cell according to the invention under conditions which induce protein expression. A process which may further include chemical synthesis of proteins and/or chemical synthesis (at least in part) of nucleotides.

[0060] A process for detecting polynucleotides of the invention is provided, comprising the steps of: (a) contacting a nucleic probe according to the invention with a biological sample under hybridizing conditions to form duplexes; and (b) detecting said duplexes.

[0061] A process for detecting proteins of the invention is provided, comprising the steps of: (a) contacting an antibody according to the invention with a biological sample under conditions suitable for the formation of an antibody-antigen complexes; and (b) detecting said complexes.

[0062] Another aspect of the present invention provides for a process for detecting antibodies that selectably bind to antigens or polypeptides or proteins specific to any species or strain of Neisserial bacteria and preferably to strains of N. gonorrhoeae but more preferably to strains of N. meningitidis, especially strain A, strain B or strain C, more preferably MenB, where the process comprises the steps of: (a) contacting antigen or polypeptide or protein according to the invention with a biological sample under conditions suitable for the formation of an antibody-antigen complexes; and (b) detecting said complexes.

[0063] Having now generally described the invention, the same will be more readily understood through reference to the following examples which are provided by way of illustration, and are not intended to be limiting of the present invention, unless specified.

Methodology—Summary of Standard Procedures and Techniques.

General

[0064] This invention provides Neisseria meningitidis MenB nucleotide sequences, amino acid sequences encoded therein. With these disclosed sequences, nucleic acid probe assays and expression cassettes and vectors can be produced. The proteins can also be chemically synthesized. The expression vectors can be transformed into host cells to produce proteins. The purified or isolated polypeptides can be used to produce antibodies to detect MenB proteins. Also, the host cells or extracts can be utilized for biological assays to isolate agonists or antagonists. In addition, with these sequences one can search to identify open reading frames and identify amino acid sequences. The proteins may also be used in immunogenic compositions and as vaccine components.

[0065] The practice of the present invention will employ, unless otherwise indicated, conventional techniques of molecular biology, microbiology, recombinant DNA, and immunology, which are within the skill of the art. Such techniques are explained fully in the literature e.g., Sambrook Molecular Cloning; A Laboratory Manual, Second Edition (1989); DNA Cloning, Volumes I and ii (D. N. Glover ed. 1985); Oligonucleotide Synthesis (M. J. Gait ed, 1984); Nucleic Acid Hybridization (B. D. Hames & S. J. Higgins eds. 1984); Transcription and Translation (B. D. Hames & S. J. Higgins eds. 1984); Animal Cell Culture (R. I. Freshney ed. 1986); Immobilized Cells and Enzymes (IRL Press, 1986); B. Perbal, A Practical Guide to Molecular Cloning (1984); the Methods in Enzymology series (Academic Press, Inc.), especially volumes 154 & 155; Gene Transfer Vectors for Mammalian Cells (J. H. Miller and M. P. Calos eds. 1987, Cold Spring Harbor Laboratory); Mayer and Walker, eds. (1987), Immunochemical Methods in Cell and Molecular Biology (Academic Press, London); Scopes, (1987) Protein Purification: Principles and Practice, Second Edition (Springer-Verlag, N.Y.), and Handbook of Experimental Immunology, Volumes I-IV (D. M. Weir and C. C. Blackwell eds 1986).

[0066] Standard abbreviations for nucleotides and amino acids are used in this specification.

[0067] All publications, patents, and patent applications cited herein are incorporated in full by reference.

Expression systems

[0068] The Neisseria MenB nucleotide sequences can be expressed in a variety of different expression systems; for example those used with mammalian cells, plant cells, baculoviruses, bacteria, and yeast.

i. Mammalian Systems

[0069] Mammalian expression systems are known in the art. A mammalian promoter is any DNA sequence capable of binding mammalian RNA polymerase and initiating the downstream (3′) transcription of a coding sequence (e.g., structural gene) into mRNA. A promoter will have a transcription initiating region, which is usually placed proximal to the 5′ end of the coding sequence, and a TATA box, usually located 25-30 base pairs (bp) upstream of the transcription initiation site. The TATA box is thought to direct RNA polymerase II to begin RNA synthesis at the correct site. A mammalian promoter will also contain an upstream promoter element, usually located within 100 to 200 bp upstream of the TATA box. An upstream promoter element determines the rate at which transcription is initiated and can act in either orientation (Sambrook et al. (1989) “Expression of Cloned Genes in Mammalian Cells.” In Molecular Cloning: A Laboratory Manual, 2nd ed.).

[0070] Mammalian viral genes are often highly expressed and have a broad host range; therefore sequences encoding mammalian viral genes provide particularly useful promoter sequences. Examples include the SV40 early promoter, mouse mammary tumor virus LTR promoter, adenovirus major late promoter (Ad MLP), and herpes simplex virus promoter. In addition, sequences derived from non-viral genes, such as the murine metallothionein gene, also provide useful promoter sequences. Expression may be either constitutive or regulated (inducible). Depending on the promoter selected, many promotes may be inducible using known substrates, such as the use of the mouse mammary tumor virus (MMTV) promoter with the glucocorticoid responsive element (GRE) that is induced by glucocorticoid in hormone-responsive transformed cells (see for example, U.S. Pat. No. 5,783,681).

[0071] The presence of an enhancer element (enhancer), combined with the promoter elements described above, will usually increase expression levels. An enhancer is a regulatory DNA sequence that can stimulate transcription up to 1000-fold when linked to homologous or heterologous promoters, with synthesis beginning at the normal RNA start site. Enhancers are also active when they are placed upstream or downstream from the transcription initiation site, in either normal or flipped orientation, or at a distance of more than 1000 nucleotides from the promoter (Maniatis et al. (1987) Science 236:1237; Alberts et al. (1989) Molecular Biology of the Cell, 2nd ed.). Enhancer elements derived from viruses may be particularly useful, because they usually have a broader host range. Examples include the SV40 early gene enhancer (Dijkema et al (1985) EMBO J. 4:761) and the enhancer/promoters derived from the long terminal repeat (LTR) of the Rous Sarcoma Virus (Gorman et al. (1982b) Proc. Natl. Acad. Sci. 79:6777) and from human cytomegalovirus (Boshart et al. (1985) Cell 41:521). Additionally, some enhancers are regulatable and become active only in the presence of an inducer, such as a hormone or metal ion (Sassone-Corsi and Borelli (1986) Trends Genet. 2:215; Maniatis et al. (1987) Science 236:1237).

[0072] A DNA molecule may be expressed intracellularly in mammalian cells. A promoter sequence may be directly linked with the DNA molecule, in which case the first amino acid at the N-terminus of the recombinant protein will always be a methionine, which is encoded by the ATG start codon. If desired, the N-terminus may be cleaved from the protein by in vitro incubation with cyanogen bromide.

[0073] Alternatively, foreign proteins can also be secreted from the cell into the growth media by creating chimeric DNA molecules that encode a fusion protein comprised of a leader sequence fragment that provides for secretion of the foreign protein in mammalian cells. Preferably, there are processing sites encoded between the leader fragment and the foreign gene that can be cleaved either in vivo or in vitro. The leader sequence fragment usually encodes a signal peptide comprised of hydrophobic amino acids which direct the secretion of the protein from the cell. The adenovirus tripartite leader is an example of a leader sequence that provides for secretion of a foreign protein in mammalian cells.

[0074] Usually, transcription termination and polyadenylation sequences recognized by mammalian cells are regulatory regions located 3′ to the translation stop codon and thus, together with the promoter elements, flank the coding sequence. The 3′ terminus of the mature mRNA is formed by site-specific post-transcriptional cleavage and polyadenylation (Birnstiel et al. (1985) Cell 41:349; Proudfoot and Whitelaw (1988) “Termination and 3′ end processing of eukaryotic RNA.” In Transcription and splicing (ed. B. D. Hames and D. M. Glover); Proudfoot (1989) Trends Biochem. Sci. 14:105). These sequences direct the transcription of an mRNA which can be translated into the polypeptide encoded by the DNA. Examples of transcription terminator/polyadenylation signals include those derived from SV40 (Sambrook et al (1989) “Expression of cloned genes in cultured mammalian cells.” In Molecular Cloning: A Laboratory Manual).

[0075] Usually, the above-described components, comprising a promoter, polyadenylation signal, and transcription termination sequence are put together into expression constructs. Enhancers, introns with functional splice donor and acceptor sites, and leader sequences may also be included in an expression construct, if desired. Expression constructs are often maintained in a replicon, such as an extrachromosomal element (e.g., plasmids) capable of stable maintenance in a host, such as mammalian cells or bacteria. Mammalian replication systems include those derived from animal viruses, which require trans-acting factors to replicate. For example, plasmids containing the replication systems of papovaviruses, such as SV40 (Gluzman (1981) Cell 23:175) or polyomavirus, replicate to extremely high copy number in the presence of the appropriate viral T antigen. Additional examples of mammalian replicons include those derived from bovine papillomavirus and Epstein-Barr virus. Additionally, the replicon may have two replication systems, thus allowing it to be maintained, for example, in mammalian cells for expression and in a prokaryotic host for cloning and amplification. Examples of such mammalian-bacteria shuttle vectors include pMT2 (Kaufman et al. (1989) Mol. Cell. Biol. 9:946) and pHEBO (Shimizu et al. (1986) Mol. Cell. Biol. 6:1074).

[0076] The transformation procedure used depends upon the host to be transformed. Methods for introduction of heterologous polynucleotides into mammalian cells are known in the art and include dextran-mediated transfection, calcium phosphate precipitation, polybrene mediated transfection, protoplast fusion, electroporation, encapsulation of the polynucleotide(s) in liposomes, and direct microinjection of the DNA into nuclei.

[0077] Mammalian cell lines available as hosts for expression are known in the art and include many immortalized cell lines available from the American Type Culture Collection (ATCC), including but not limited to, Chinese hamster ovary (CHO) cells, HeLa cells, baby hamster kidney (BHK) cells, monkey kidney cells (COS), human hepatocellular carcinoma cells (e.g., Hep G2), and a number of other cell lines.

ii. Plant Cellular Expression Systems

[0078] There are many plant cell culture and whole plant genetic expression systems known in the art. Exemplary plant cellular genetic expression systems include those described in patents, such as: U.S. Pat. No. 5,693,506; U.S. Pat. No. 5,659,122; and U.S. Pat. No. 5,608,143. Additional examples of genetic expression in plant cell culture has been described by Zenk, Phytochemistry 30:3861-3863 (1991). Descriptions of plant protein signal peptides may be found in addition to the references described above in Vaulcombe et al., Mol. Gen. Genet. 209:33-40 (1987); Chandler et al., Plant Molecular Biology 3:407-418 (1984); Rogers, J. Biol. Chem. 260:3731-3738 (1985); Rothstein et al., Gene 55:353-356 (1987); Whittier et al., Nucleic Acids Research 15:2515-2535 (1987); Wirsel et al., Molecular Microbiology 3:3-14 (1989); Yu et al., Gene 122:247-253 (1992). A description of the regulation of plant gene expression by the phytohormone, gibberellic acid and secreted enzymes induced by gibberellic acid can be found in R. L. Jones and J. MacMillin, Gibberellins: in: Advanced Plant Physiology, Malcolm B. Wilkins, ed., 1984 Pitman Publishing Limited, London, pp. 21-52. References that describe other metabolically-regulated genes: Sheen, Plant Cell, 2:1027-1038(1990); Maas et al., EMBO J. 9:3447-3452 (1990); Benkel and Hickey, Proc. Natl. Acad. Sci. 84:1337-1339 (1987)

[0079] Typically, using techniques known in the art, a desired polynucleotide sequence is inserted into an expression cassette comprising genetic regulatory elements designed for operation in plants. The expression cassette is inserted into a desired expression vector with companion sequences upstream and downstream from the expression cassette suitable for expression in a plant host. The companion sequences will be of plasmid or viral origin and provide necessary characteristics to the vector to permit the vectors to move DNA from an original cloning host, such as bacteria, to the desired plant host. The basic bacterial/plant vector construct will preferably provide a broad host range prokaryote replication origin; a prokaryote selectable marker; and, for Agrobacterium transformations, T DNA sequences for Agrobacterium-mediated transfer to plant chromosomes. Where the heterologous gene is not readily amenable to detection, the construct will preferably also have a selectable marker gene suitable for determining if a plant cell has been transformed. A general review of suitable markers, for example for the members of the grass family, is found in Wilmink and Dons, 1993, Plant Mol. Biol. Reptr, 11 (2):165-185.

[0080] Sequences suitable for permitting integration of the heterologous sequence into the plant genome are also recommended. These might include transposon sequences and the like for homologous recombination as well as Ti sequences which permit random insertion of a heterologous expression cassette into a plant genome. Suitable prokaryote selectable markers include resistance toward antibiotics such as ampicillin or tetracycline. Other DNA sequences encoding additional functions may also be present in the vector, as is known in the art.

[0081] The nucleic acid molecules of the subject invention may be included into an expression cassette for expression of the protein(s) of interest. Usually, there will be only one expression cassette, although two or more are feasible. The recombinant expression cassette will contain in addition to the heterologous protein encoding sequence the following elements, a promoter region, plant 5′ untranslated sequences, initiation codon depending upon whether or not the structural gene comes equipped with one, and a transcription and translation termination sequence. Unique restriction enzyme sites at the 5′ and 3′ ends of the cassette allow for easy insertion into a pre-existing vector.

[0082] A heterologous coding sequence may be for any protein relating to the present invention. The sequence encoding the protein of interest will encode a signal peptide which allows processing and translocation of the protein, as appropriate, and will usually lack any sequence which might result in the binding of the desired protein of the invention to a membrane. Since, for the most part, the transcriptional initiation region will be for a gene which is expressed and translocated during germination, by employing the signal peptide which provides for translocation, one may also provide for translocation of the protein of interest. In this way, the protein(s) of interest will be translocated from the cells in which they are expressed and may be efficiently harvested. Typically secretion in seeds are across the aleurone or scutellar epithelium layer into the endosperm of the seed. While it is not required that the protein be secreted from the cells in which the protein is produced, this facilitates the isolation and purification of the recombinant protein.

[0083] Since the ultimate expression of the desired gene product will be in a eucaryotic cell it is desirable to determine whether any portion of the cloned gene contains sequences which will be processed out as introns by the host's splicosome machinery. If so, site-directed mutagenesis of the “intron” region may be conducted to prevent losing a portion of the genetic message as a false intron code, Reed and Maniatis, Cell 41:95-105, 1985.

[0084] The vector can be microinjected directly into plant cells by use of micropipettes to mechanically transfer the recombinant DNA. Crossway, Mol. Gen. Genet, 202:179-185, 1985. The genetic material may also be transferred into the plant cell by using polyethylene glycol, Krens, et al., Nature, 296, 72-74, 1982. Another method of introduction of nucleic acid segments is high velocity ballistic penetration by small particles with the nucleic acid either within the matrix of small beads or particles, or on the surface, Klein, et al., Nature, 327, 70-73, 1987 and Knudsen and Muller, 1991, Planta, 185:330-336 teaching particle bombardment of barley endosperm to create transgenic barley. Yet another method of introduction would be fusion of protoplasts with other entities, either minicells, cells, lysosomes or other fusible lipid-surfaced bodies, Fraley, et al., Proc. Natl. Acad. Sci. USA, 79, 1859-1863, 1982.

[0085] The vector may also be introduced into the plant cells by electroporation. (Fromm et al., Proc. Natl. Acad. Sci. USA 82:5824, 1985). In this technique, plant protoplasts are electroporated in the presence of plasmids containing the gene construct. Electrical impulses of high field strength reversibly permeabilize biomembranes allowing the introduction of the plasmids. Electroporated plant protoplasts reform the cell wall, divide, and form plant callus.

[0086] All plants from which protoplasts can be isolated and cultured to give whole regenerated plants can be transformed by the present invention so that whole plants are recovered which contain the transferred gene. It is known that practically all plants can be regenerated from cultured cells or tissues, including but not limited to all major species of sugarcane, sugar beet, cotton, fruit and other trees, legumes and vegetables. Some suitable plants include, for example, species from the genera Fragaria, Lotus, Medicago, Onobrychis, Trifolium, Trigonella, Vigna, Citrus, Linum, Geranium, Manihot, Daucus, Arabidopsis, Brassica, Raphanus, Sinapis, Atropa, Capsicum, Datura, Hyoscyamus, Lycopersion, Nicotiana, Solanum, Petunia, Digitalis, Majorana, Cichorium, Helianthus, Lactuca, Bromus, Asparagus, Antirrhinum, Hererocallis, Nemesia, Pelargonium, Panicum, Pennisetum, Ranunculus, Senecio, Salpiglossis, Cucumis, Browaalia, Glycine, Lolium, Zea, Triticum, Sorghum, and Datura.

[0087] Means for regeneration vary from species to species of plants, but generally a suspension of transformed protoplasts containing copies of the heterologous gene is first provided. Callus tissue is formed and shoots may be induced from callus and subsequently rooted. Alternatively, embryo formation can be induced from the protoplast suspension. These embryos germinate as natural embryos to form plants. The culture media will generally contain various amino acids and hormones, such as auxin and cytokinins. It is also advantageous to add glutamic acid and proline to the medium, especially for such species as corn and alfalfa. Shoots and roots normally develop simultaneously. Efficient regeneration will depend on the medium, on the genotype, and on the history of the culture. If these three variables are controlled, then regeneration is fully reproducible and repeatable.

[0088] In some plant cell culture systems, the desired protein of the invention may be excreted or alternatively, the protein may be extracted from the whole plant. Where the desired protein of the invention is secreted into the medium, it may be collected. Alternatively, the embryos and embryoless-half seeds or other plant tissue may be mechanically disrupted to release any secreted protein between cells and tissues. The mixture may be suspended in a buffer solution to retrieve soluble proteins. Conventional protein isolation and purification methods will be then used to purify the recombinant protein. Parameters of time, temperature pH, oxygen, and volumes will be adjusted through routine methods to optimize expression and recovery of heterologous protein.

iii. Baculovirus Systems

[0089] The polynucleotide encoding the protein can also be inserted into a suitable insect expression vector, and is operably linked to the control elements within that vector. Vector construction employs techniques which are known in the art. Generally, the components of the expression system include a transfer vector, usually a bacterial plasmid, which contains both a fragment of the baculovirus genome, and a convenient restriction site for insertion of the heterologous gene or genes to be expressed; a wild type baculovirus with a sequence homologous to the baculovirus-specific fragment in the transfer vector (this allows for the homologous recombination of the heterologous gene in to the baculovirus genome); and appropriate insect host cells and growth media.

[0090] After inserting the DNA sequence encoding the protein into the transfer vector, the vector and the wild type viral genome are transfected into an insect host cell where the vector and viral genome are allowed to recombine. The packaged recombinant virus is expressed and recombinant plaques are identified and purified. Materials and methods for baculovirus/insect cell expression systems are commercially available in kit form from, inter alia, Invitrogen, San Diego Calif. (“MaxBac” kit). These techniques are generally known to those skilled in the art and fully described in Summers and Smith, Texas Agricultural Experiment Station Bulletin No. 1555 (1987) (hereinafter “Summers and Smith”).

[0091] Prior to inserting the DNA sequence encoding the protein into the baculovirus genome, the above described components, comprising a promoter, leader (if desired), coding sequence of interest, and transcription termination sequence, are usually assembled into an intermediate transplacement construct (transfer vector). This construct may contain a single gene and operably linked regulatory elements; multiple genes, each with its owned set of operably linked regulatory elements; or multiple genes, regulated by the same set of regulatory elements. Intermediate transplacement constructs are often maintained in a replicon, such as an extrachromosomal element (e.g., plasmids) capable of stable maintenance in a host, such as a bacterium. The replicon will have a replication system, thus allowing it to be maintained in a suitable host for cloning and amplification.

[0092] Currently, the most commonly used transfer vector for introducing foreign genes into AcNPV is pAc373. Many other vectors, known to those of skill in the art, have also been designed. These include, for example, pVL985 (which alters the polyhedrin start codon from ATG to ATT, and which introduces a BamHI cloning site 32 basepairs downstream from the ATT; see Luckow and Summers, Virology (1989) 17:31.

[0093] The plasmid usually also contains the polyhedrin polyadenylation signal (Miller et al. (1988) Ann. Rev. Microbiol., 42:177) and a prokaryotic ampicillin-resistance (amp) gene and origin of replication for selection and propagation in E. coli.

[0094] Baculovirus transfer vectors usually contain a baculovirus promoter. A baculovirus promoter is any DNA sequence capable of binding a baculovirus RNA polymerase and initiating the downstream (5′ to 3′) transcription of a coding sequence (e.g., structural gene) into mRNA. A promoter will have a transcription initiation region which is usually placed proximal to the 5′ end of the coding sequence. This transcription initiation region usually includes an RNA polymerase binding site and a transcription initiation site. A baculovirus transfer vector may also have a second domain called an enhancer, which, if present, is usually distal to the structural gene. Expression may be either regulated or constitutive.

[0095] Structural genes, abundantly transcribed at late times in a viral infection cycle, provide particularly useful promoter sequences. Examples include sequences derived from the gene encoding the viral polyhedron protein, Friesen et al., (1986) “The Regulation of Baculovirus Gene Expression,” in: The Molecular Biology of Baculoviruses (ed. Walter Doerfler); EPO Publ. Nos. 127 839 and 155 476; and the gene encoding the p10 protein, Vlak et al., (1988), J. Gen. Virol. 69:765.

[0096] DNA encoding suitable signal sequences can be derived from genes for secreted insect or baculovirus proteins, such as the baculovirus polyhedrin gene (Carbonell et al. (1988) Gene, 73:409). Alternatively, since the signals for mammalian cell posttranslational modifications (such as signal peptide cleavage, proteolytic cleavage, and phosphorylation) appear to be recognized by insect cells, and the signals required for secretion and nuclear accumulation also appear to be conserved between the invertebrate cells and vertebrate cells, leaders of non-insect origin, such as those derived from genes encoding human (alpha) α-interferon, Maeda et al., (1985), Nature 315:592; human gastrin-releasing peptide, Lebacq-Verheyden et al., (1988), Molec. Cell. Biol. 8:3129; human IL-2, Smith et al., (1985) Proc. Nat'l Acad. Sci. USA, 82:8404; mouse IL-3, (Miyajima et al., (1987) Gene 58:273; and human glucocerebrosidase, Martin et al. (1988) DNA, 7:99, can also be used to provide for secretion in insects.

[0097] A recombinant polypeptide or polyprotein may be expressed intracellularly or, if it is expressed with the proper regulatory sequences, it can be secreted. Good intracellular expression of nonfused foreign proteins usually requires heterologous genes that ideally have a short leader sequence containing suitable translation initiation signals preceding an ATG start signal. If desired, methionine at the N-terminus may be cleaved from the mature protein by in vitro incubation with cyanogen bromide.

[0098] Alternatively, recombinant polyproteins or proteins which are not naturally secreted can be secreted from the insect cell by creating chimeric DNA molecules that encode a fusion protein comprised of a leader sequence fragment that provides for secretion of the foreign protein in insects. The leader sequence fragment usually encodes a signal peptide comprised of hydrophobic amino acids which direct the translocation of the protein into the endoplasmic reticulum.

[0099] After insertion of the DNA sequence and/or the gene encoding the expression product precursor of the protein, an insect cell host is co-transformed with the heterologous DNA of the transfer vector and the genomic DNA of wild type baculovirus—usually by co-transfection. The promoter and transcription termination sequence of the construct will usually comprise a 2-5 kb section of the baculovirus genome. Methods for introducing heterologous DNA into the desired site in the baculovirus virus are known in the art. (See Summers and Smith supra; Ju et al. (1987); Smith et al., Mol. Cell. Biol. (1983) 3:2156; and Luckow and Summers (1989)). For example, the insertion can be into a gene such as the polyhedrin gene, by homologous double crossover recombination; insertion can also be into a restriction enzyme site engineered into the desired baculovirus gene. Miller et al., (1989), Bioessays 4:91. The DNA sequence, when cloned in place of the polyhedrin gene in the expression vector, is flanked both 5′ and 3′ by polyhedrin-specific sequences and is positioned downstream of the polyhedrin promoter.

[0100] The newly formed baculovirus expression vector is subsequently packaged into an infectious recombinant baculovirus. Homologous recombination occurs at low frequency (between about 1% and about 5%); thus, the majority of the virus produced after cotransfection is still wild-type virus. Therefore, a method is necessary to identify recombinant viruses. An advantage of the expression system is a visual screen allowing recombinant viruses to be distinguished. The polyhedrin protein, which is produced by the native virus, is produced at very high levels in the nuclei of infected cells at late times after viral infection. Accumulated polyhedrin protein forms occlusion bodies that also contain embedded particles. These occlusion bodies, up to 15 μm in size, are highly refractile, giving them a bright shiny appearance that is readily visualized under the light microscope. Cells infected with recombinant viruses lack occlusion bodies. To distinguish recombinant virus from wild-type virus, the transfection supernatant is plaqued onto a monolayer of insect cells by techniques known to those skilled in the art. Namely, the plaques are screened under the light microscope for the presence (indicative of wild-type virus) or absence (indicative of recombinant virus) of occlusion bodies. Current Protocols in Microbiology Vol. 2 (Ausubel et al. eds) at 16.8 (Supp. 10, 1990); Summers and Smith, supra; Miller et al. (1989).

[0101] Recombinant baculovirus expression vectors have been developed for infection into several insect cells. For example, recombinant baculoviruses have been developed for, inter alia: Aedes aegypti , Autographa californica, Bombyx mori, Drosophila melanogaster, Spodoptera frugiperda, and Trichoplusia ni (PCT Pub. No. WO 89/046699; Carbonell et al., (1985) J. Virol. 56:153; Wright (1986) Nature 321:718; Smith et al., (1983) Mol. Cell. Biol. 3:2156; and see generally, Fraser, et al. (1989) In Vitro Cell. Dev. Biol. 25:225).

[0102] Cells and cell culture media are commercially available for both direct and fusion expression of heterologous polypeptides in a baculovirus/expression system; cell culture technology is generally known to those skilled in the art. See, e.g., Summers and Smith supra.

[0103] The modified insect cells may then be grown in an appropriate nutrient medium, which allows for stable maintenance of the plasmid(s) present in the modified insect host. Where the expression product gene is under inducible control, the host may be grown to high density, and expression induced. Alternatively, where expression is constitutive, the product will be continuously expressed into the medium and the nutrient medium must be continuously circulated, while removing the product of interest and augmenting depleted nutrients. The product may be purified by such techniques as chromatography, e.g., HPLC, affinity chromatography, ion exchange chromatography, etc.; electrophoresis; density gradient centrifugation; solvent extraction, or the like. As appropriate, the product may be further purified, as required, so as to remove substantially any insect proteins which are also secreted in the medium or result from lysis of insect cells, so as to provide a product which is at least substantially free of host debris, e.g., proteins, lipids and polysaccharides.

[0104] In order to obtain protein expression, recombinant host cells derived from the transformants are incubated under conditions which allow expression of the recombinant protein encoding sequence. These conditions will vary, dependent upon the host cell selected. However, the conditions are readily ascertainable to those of ordinary skill in the art, based upon what is known in the art.

iv. Bacterial Systems

[0105] Bacterial expression techniques are known in the art. A bacterial promoter is any DNA sequence capable of binding bacterial RNA polymerase and initiating the downstream (3′) transcription of a coding sequence (e.g. structural gene) into mRNA. A promoter will have a transcription initiation region which is usually placed proximal to the 5′ end of the coding sequence. This transcription initiation region usually includes an RNA polymerase binding site and a transcription initiation site. A bacterial promoter may also have a second domain called an operator, that may overlap an adjacent RNA polymerase binding site at which RNA synthesis begins. The operator permits negative regulated (inducible) transcription, as a gene repressor protein may bind the operator and thereby inhibit transcription of a specific gene. Constitutive expression may occur in the absence of negative regulatory elements, such as the operator. In addition, positive regulation may be achieved by a gene activator protein binding sequence, which, if present is usually proximal (5′) to the RNA polymerase binding sequence. An example of a gene activator protein is the catabolite activator protein (CAP), which helps initiate transcription of the lac operon in Escherichia coli (E. coli) (Raibaud et al. (1984) Annu. Rev. Genet. 18:173). Regulated expression may therefore be either positive or negative, thereby either enhancing or reducing transcription.

[0106] Sequences encoding metabolic pathway enzymes provide particularly useful promoter sequences. Examples include promoter sequences derived from sugar metabolizing enzymes, such as galactose, lactose (lac) (Chang et al. (1977) Nature 198:1056), and maltose. Additional examples include promoter sequences derived from biosynthetic enzymes such as tryptophan (trp) (Goeddel et al. (1980) Nuc. Acids Res. 8:4057; Yelverton et al. (1981) Nucl. Acids Res. 9:731; U.S. Pat. No. 4,738,921; EPO Publ. Nos. 036 776 and 121 775). The beta-lactamase (bla) promoter system (Weissmann (1981) “The cloning of interferon and other mistakes.” In Interferon 3 (ed. I. Gresser)), bacteriophage lambda PL (Shimatake et al. (1981) Nature 292:128) and T5 (U.S. Pat. No. 4,689,406) promoter systems also provide useful promoter sequences.

[0107] In addition, synthetic promoters which do not occur in nature also function as bacterial promoters. For example, transcription activation sequences of one bacterial or bacteriophage promoter may be joined with the operon sequences of another bacterial or bacteriophage promoter, creating a synthetic hybrid promoter (U.S. Pat. No. 4,551,433). For example, the tac promoter is a hybrid tip-lac promoter comprised of both trp promoter and lac operon sequences that is regulated by the lac repressor (Amann et al. (1983) Gene 25:167; de Boer et al. (1983) Proc. Natl. Acad. Sci. 80:21). Furthermore, a bacterial promoter can include naturally occurring promoters of non-bacterial origin that have the ability to bind bacterial RNA polymerase and initiate transcription. A naturally occurring promoter of non-bacterial origin can also be coupled with a compatible RNA polymerase to produce high levels of expression of some genes in prokaryotes. The bacteriophage T7 RNA polymerase/promoter system is an example of a coupled promoter system (Studier et al. (1986) J. Mol. Biol. 189:113; Tabor et al. (1985) Proc Natl. Acad. Sci. 82:1074). In addition, a hybrid promoter can also be comprised of a bacteriophage promoter and an E. coli operator region (EPO Publ. No. 267 851).

[0108] In addition to a functioning promoter sequence, an efficient ribosome binding site is also useful for the expression of foreign genes in prokaryotes. In E. coli, the ribosome binding site is called the Shine-Dalgamo (SD) sequence and includes an initiation codon (ATG) and a sequence 3-9 nucleotides in length located 3-11 nucleotides upstream of the initiation codon (Shine et al. (1975) Nature 254:34). The SD sequence is thought to promote binding of mRNA to the ribosome by the pairing of bases between the SD sequence and the 3′ end of E. coli 16S rRNA (Steitz et al. (1979) “Genetic signals and nucleotide sequences in messenger RNA.” In Biological Regulation and Development: Gene Expression (ed. R. F. Goldberger)). To express eukaryotic genes and prokaryotic genes with weak ribosome-binding site, it is often necessary to optimize the distance between the SD sequence and the ATG of the eukaryotic gene (Sambrook et al. (1989) “Expression of cloned genes in Escherichia coli.” In Molecular Cloning: A Laboratory Manual).

[0109] A DNA molecule may be expressed intracellularly. A promoter sequence may be directly linked with the DNA molecule, in which case the first amino acid at the N-terminus will always be a methionine, which is encoded by the ATG start codon. If desired, methionine at the N-terminus may be cleaved from the protein by in vitro incubation with cyanogen bromide or by either in vivo or in vitro incubation with a bacterial methionine N-terminal peptidase (EPO Publ. No. 219 237).

[0110] Fusion proteins provide an alternative to direct expression. Usually, a DNA sequence encoding the N-terminal portion of an endogenous bacterial protein, or other stable protein, is fused to the 5′ end of heterologous coding sequences. Upon expression, this construct will provide a fusion of the two amino acid sequences. For example, the bacteriophage lambda cell gene can be linked at the 5′ terminus of a foreign gene and expressed in bacteria. The resulting fusion protein preferably retains a site for a processing enzyme (factor Xa) to cleave the bacteriophage protein from the foreign gene (Nagai et al. (1984) Nature 309:810). Fusion proteins can also be made with sequences from the lacZ (Jia et al. (1987) Gene 60:197), trpE (Allen et al. (1987) J. Biotechnol. 5:93; Makoff et al. (1989) J. Gen. Microbiol. 135:11), and Chey (EPO Publ. No. 324 647) genes. The DNA sequence at the junction of the two amino acid sequences may or may not encode a cleavable site. Another example is a ubiquitin fusion protein. Such a fusion protein is made with the ubiquitin region that preferably retains a site for a processing enzyme (e.g. ubiquitin specific processing-protease) to cleave the ubiquitin from the foreign protein. Through this method, native foreign protein can be isolated (Miller et al. (1989) Bio/Technology 7:698).

[0111] Alternatively, foreign proteins can also be secreted from the cell by creating chimeric DNA molecules that encode a fusion protein comprised of a signal peptide sequence fragment that provides for secretion of the foreign protein in bacteria (U.S. Pat. No. 4,336,336). The signal sequence fragment usually encodes a signal peptide comprised of hydrophobic amino acids which direct the secretion of the protein from the cell. The protein is either secreted into the growth media (gram-positive bacteria) or into the periplasmic space, located between the inner and outer membrane of the cell (gram-negative bacteria). Preferably there are processing sites, which can be cleaved either in vivo or in vitro encoded between the signal peptide fragment and the foreign gene.

[0112] DNA encoding suitable signal sequences can be derived from genes for secreted bacterial proteins, such as the E. coli outer membrane protein gene (ompA) (Masui et al. (1983), in: Experimental Manipulation of Gene Expression; Ghrayeb et al. (1984) EMBO J. 3:2437) and the E. coli alkaline phosphatase signal sequence (phoA) (Oka et al. (1985) Proc. Natl. Acad. Sci. 82:7212). As an additional example, the signal sequence of the alpha-amylase gene from various Bacillus strains can be used to secrete heterologous proteins from B. subtilis (Palva et al. (1982) Proc. Natl. Acad. Sci. USA 79:5582; EPO Publ. No. 244 042).

[0113] Usually, transcription termination sequences recognized by bacteria are regulatory regions located 3′ to the translation stop codon, and thus together with the promoter flank the coding sequence. These sequences direct the transcription of an mRNA which can be translated into the polypeptide encoded by the DNA. Transcription termination sequences frequently include DNA sequences of about 50 nucleotides capable of forming stem loop structures that aid in terminating transcription. Examples include transcription termination sequences derived from genes with strong promoters, such as the trp gene in E. coli as well as other biosynthetic genes.

[0114] Usually, the above described components, comprising a promoter, signal sequence (if desired), coding sequence of interest, and transcription termination sequence, are put together into expression constructs. Expression constructs are often maintained in a replicon, such as an extrachromosomal element (e.g., plasmids) capable of stable maintenance in a host, such as bacteria. The replicon will have a replication system, thus allowing it to be maintained in a prokaryotic host either for expression or for cloning and amplification. In addition, a replicon may be either a high or low copy number plasmid. A high copy number plasmid will generally have a copy number ranging from about 5 to about 200, and usually about 10 to about 150. A host containing a high copy number plasmid will preferably contain at least about 10, and more preferably at least about 20 plasmids. Either a high or low copy number vector may be selected, depending upon the effect of the vector and the foreign protein on the host.

[0115] Alternatively, the expression constructs can be integrated into the bacterial genome with an integrating vector. Integrating vectors usually contain at least one sequence homologous to the bacterial chromosome that allows the vector to integrate. Integrations appear to result from recombinations between homologous DNA in the vector and the bacterial chromosome. For example, integrating vectors constructed with DNA from various Bacillus strains integrate into the Bacillus chromosome (EPO Publ. No. 127 328). Integrating vectors may also be comprised of bacteriophage or transposon sequences.

[0116] Usually, extrachromosomal and integrating expression constructs may contain selectable markers to allow for the selection of bacterial strains that have been transformed. Selectable markers can be expressed in the bacterial host and may include genes which render bacteria resistant to drugs such as ampicillin, chloramphenicol, erythromycin, kanamycin (neomycin), and tetracycline (Davies et al. (1978) Annu. Rev. Microbiol. 32:469). Selectable markers may also include biosynthetic genes, such as those in the histidine, tryptophan, and leucine biosynthetic pathways.

[0117] Alternatively, some of the above described components can be put together in transformation vectors. Transformation vectors are usually comprised of a selectable market that is either maintained in a replicon or developed into an integrating vector, as described above.

[0118] Expression and transformation vectors, either extra-chromosomal replicons or integrating vectors, have been developed for transformation into many bacteria. For example, expression vectors have been developed for, inter alia, the following bacteria: Bacillus subtilis (Palva et al. (1982) Proc. Natl. Acad. Sci. USA 79:5582; EPO Publ. Nos. 036 259 and 063 953; PCT Publ. No. WO 84/04541), Escherichia coli (Shimatake et al. (1981) Nature 292:128; Amann et al. (1985) Gene 40:183; Studier et al. (1986) J. Mol. Biol. 189:113; EPO Publ. Nos. 036 776, 136 829 and 136 907), Streptococcus cremoris (Powell et al. (1988) Appl. Environ. Microbiol. 54:655); Streptococcus lividans (Powell et al. (1988) Appl. Environ. Microbiol. 54:655), Streptomyces lividans (U.S. Pat. No. 4,745,056).

[0119] Methods of introducing exogenous DNA into bacterial hosts are well-known in the art, and usually include either the transformation of bacteria treated with CaCl₂ or other agents, such as divalent cations and DMSO. DNA can also be introduced into bacterial cells by electroporation. Transformation procedures usually vary with the bacterial species to be transformed. (See e.g., use of Bacillus: Masson et al. (1989) FEMS Microbiol. Lett. 60:273; Palva et al. (1982) Proc. Natl. Acad. Sci. USA 79:5582; EPO Publ. Nos. 036 259 and 063 953; PCT Publ. No. WO 84/04541; use of Campylobacter: Miller et al. (1988) Proc. Natl. Acad. Sci. 85:856; and Wang et al. (1990) J. Bacteriol. 172:949; use of Escherichia coli: Cohen et al. (1973) Proc. Natl. Acad. Sci. 69:2110; Dower et al. (1988) Nucleic Acids Res. 16:6127; Kushner (1978) “An improved method for transformation of Escherichia coli with ColE1-derived plasmids.” In Genetic Engineering: Proceedings of the International Symposium on Genetic Engineering (eds. H. W. Boyer and S. Nicosia); Mandel et al. (1970) J. Mol. Biol. 53:159; Taketo (1988) Biochim. Biophys. Acta 949:318; use of Lactobacillus: Chassy et al. (1987) FEMS Microbiol. Lett. 44:173; use of Pseudomonas: Fiedler et al. (1988) Anal. Biochem 170:38; use of Staphylococcus: Augustin et al. (1990) FEMS Microbiol. Lett. 66:203; use of Streptococcus: Barany et al. (1980) J. Bacteriol. 144:698; Harlander (1987) “Transformation of Streptococcus lactis by electroporation,” in: Streptococcal Genetics (ed. J. Ferretti and R. Curtiss III); Perry et al. (1981) Infect. Immun. 32:1295; Powell et al. (1988) Appl. Environ. Microbiol. 54:655; Somkuti et al. (1987) Proc. 4th Evr. Cong. Biotechnology 1:412.

v. Yeast Expression

[0120] Yeast expression systems are also known to one of ordinary skill in the art. A yeast promoter is any DNA sequence capable of binding yeast RNA polymerase and initiating the downstream (3′) transcription of a coding sequence (e.g. structural gene) into mRNA. A promoter will have a transcription initiation region which is usually placed proximal to the 5′ end of the coding sequence. This transcription initiation region usually includes an RNA polymerase binding site (the “TATA Box”) and a transcription initiation site. A yeast promoter may also have a second domain called an upstream activator sequence (UAS), which, if present, is usually distal to the structural gene. The UAS permits regulated (inducible) expression. Constitutive expression occurs in the absence of a UAS. Regulated expression may be either positive or negative, thereby either enhancing or reducing transcription.

[0121] Yeast is a fermenting organism with an active metabolic pathway, therefore sequences encoding enzymes in the metabolic pathway provide particularly useful promoter sequences. Examples include alcohol dehydrogenase (ADH) (EPO Publ. No. 284 044), enolase, glucokinase, glucose-6-phosphate isomerase, glyceraldehyde-3-phosphate-dehydrogenase (GAP or GAPDH), hexokinase, phosphofructokinase, 3-phosphoglycerate mutase, and pyruvate kinase (PyK) (EPO Publ. No. 329 203). The yeast PHO5 gene, encoding acid phosphatase, also provides useful promoter sequences (Myanohara et al. (1983) Proc. Natl. Acad. Sci. USA 80:1).

[0122] In addition, synthetic promoters which do not occur in nature also function as yeast promoters. For example, UAS sequences of one yeast promoter may be joined with the transcription activation region of another yeast promoter, creating a synthetic hybrid promoter. Examples of such hybrid promoters include the ADH regulatory sequence linked to the GAP transcription activation region (U.S. Pat. Nos. 4,876,197 and 4,880,734). Other examples of hybrid promoters include promoters which consist of the regulatory sequences of either the ADH2, GAL4, GAL10, OR PHO5 genes, combined with the transcriptional activation region of a glycolytic enzyme gene such as GAP or PyK (EPO Publ. No. 164 556). Furthermore, a yeast promoter can include naturally occurring promoters of non-yeast origin that have the ability to bind yeast RNA polymerase and initiate transcription. Examples of such promoters include, inter alia, (Cohen et al. (1980) Proc. Natl. Acad. Sci. USA 77:1078; Henikoff et al. (1981) Nature 283:835; Hollenberg et al. (1981) Curr. Topics Microbiol. Immunol. 96:119; Hollenberg et al. (1979) “The Expression of Bacterial Antibiotic Resistance Genes in the Yeast Saccharomyces cerevisiae,” in: Plasmids of Medical, Environmental and Commercial Importance (eds. K. N. Timmis and A. Puhler); Mercerau-Puigalon et al. (1980) Gene 11: 163; Panthier et al. (1980) Curr. Genet. 2:109).

[0123] A DNA molecule may be expressed intracellularly in yeast. A promoter sequence may be directly linked with the DNA molecule, in which case the first amino acid at the N-terminus of the recombinant protein will always be a methionine, which is encoded by the ATG start codon. If desired, methionine at the N-terminus may be cleaved from the protein by in vitro incubation with cyanogen bromide.

[0124] Fusion proteins provide an alternative for yeast expression systems, as well as in mammalian, plant, baculovirus, and bacterial expression systems. Usually, a DNA sequence encoding the N-terminal portion of an endogenous yeast protein, or other stable protein, is fused to the 5′ end of heterologous coding sequences. Upon expression, this construct will provide a fusion of the two amino acid sequences. For example, the yeast or human superoxide dismutase (SOD) gene, can be linked at the 5′ terminus of a foreign gene and expressed in yeast. The DNA sequence at the junction of the two amino acid sequences may or may not encode a cleavable site. See e.g., EPO Publ. No. 196056. Another example is a ubiquitin fusion protein. Such a fusion protein is made with the ubiquitin region that preferably retains a site for a processing enzyme (e.g. ubiquitin-specific processing protease) to cleave the ubiquitin from the foreign protein. Through this method, therefore, native foreign protein can be isolated (e.g., WO88/024066).

[0125] Alternatively, foreign proteins can also be secreted from the cell into the growth media by creating chimeric DNA molecules that encode a fusion protein comprised of a leader sequence fragment that provide for secretion in yeast of the foreign protein. Preferably, there are processing sites encoded between the leader fragment and the foreign gene that can be cleaved either in vivo or in vitro. The leader sequence fragment usually encodes a signal peptide comprised of hydrophobic amino acids which direct the secretion of the protein from the cell.

[0126] DNA encoding suitable signal sequences can be derived from genes for secreted yeast proteins, such as the yeast invertase gene (EPO Publ. No. 012 873; JPO Publ. No. 62:096,086) and the A-factor gene (U.S. Pat. No. 4,588,684). Alternatively, leaders of non-yeast origin, such as an interferon leader, exist that also provide for secretion in yeast (EPO Publ. No. 060 057).

[0127] A preferred class of secretion leaders are those that employ a fragment of the yeast alpha-factor gene, which contains both a “pre” signal sequence, and a “pro” region. The types of alpha-factor fragments that can be employed include the full-length pre-pro alpha factor leader (about 83 amino acid residues) as well as truncated alpha-factor leaders (usually about 25 to about 50 amino acid residues) (U.S. Pat. Nos. 4,546,083 and 4,870,008; EPO Publ. No. 324 274). Additional leaders employing an alpha-factor leader fragment that provides for secretion include hybrid alpha-factor leaders made with a presequence of a first yeast, but a pro-region from a second yeast alpha factor. (See e.g., PCT Publ. No. WO 89/02463.)

[0128] Usually, transcription termination sequences recognized by yeast are regulatory regions located 3′ to the translation stop codon, and thus together with the promoter flank the coding sequence. These sequences direct the transcription of an mRNA which can be translated into the polypeptide encoded by the DNA. Examples of transcription terminator sequence and other yeast-recognized termination sequences, such as those coding for glycolytic enzymes.

[0129] Usually, the above described components, comprising a promoter, leader (if desired), coding sequence of interest, and transcription termination sequence, are put together into expression constructs. Expression constructs are often maintained in a replicon, such as an extrachromosomal element (e.g., plasmids) capable of stable maintenance in a host, such as yeast or bacteria. The replicon may have two replication systems, thus allowing it to be maintained, for example, in yeast for expression and in a prokaryotic host for cloning and amplification. Examples of such yeast-bacteria shuttle vectors include YEp24 (Botstein et al. (1979) Gene 8:17-24), pCl/1 (Brake et al. (1984) Proc. Natl. Acad. Sci USA 81:4642-4646), and YRp17 (Stinchcomb et al. (1982) J. Mol. Biol. 158:157). In addition, a replicon may be either a high or low copy number plasmid. A high copy number plasmid will generally have a copy number ranging from about 5 to about 200, and usually about 10 to about 150. A host containing a high copy number plasmid will preferably have at least about 10, and more preferably at least about 20. Enter a high or low copy number vector may be selected, depending upon the effect of the vector and the foreign protein on the host. See e.g., Brake et al., supra.

[0130] Alternatively, the expression constructs can be integrated into the yeast genome with an integrating vector. Integrating vectors usually contain at least one sequence homologous to a yeast chromosome that allows the vector to integrate, and preferably contain two homologous sequences flanking the expression construct. Integrations appear to result from recombinations between homologous DNA in the vector and the yeast chromosome (Orr-Weaver et al. (1983) Methods in Enzymol. 101:228-245). An integrating vector may be directed to a specific locus in yeast by selecting the appropriate homologous sequence for inclusion in the vector. See Orr-Weaver et al., supra. One or more expression construct may integrate, possibly affecting levels of recombinant protein produced (Rine et al. (1983) Proc. Natl. Acad. Sci. USA 80:6750). The chromosomal sequences included in the vector can occur either as a single segment in the vector, which results in the integration of the entire vector, or two segments homologous to adjacent segments in the chromosome and flanking the expression construct in the vector, which can result in the stable integration of only the expression construct.

[0131] Usually, extrachromosomal and integrating expression constructs may contain selectable markers to allow for the selection of yeast strains that have been transformed. Selectable markers may include biosynthetic genes that can be expressed in the yeast host, such as ADE2, HIS4, LEU2, TRP1, and ALG7, and the G418 resistance gene, which confer resistance in yeast cells to tunicamycin and G418, respectively. In addition, a suitable selectable marker may also provide yeast with the ability to grow in the presence of toxic compounds, such as metal. For example, the presence of CUP1 allows yeast to grow in the presence of copper ions (Butt et al. (1987) Microbiol, Rev. 51:351).

[0132] Alternatively, some of the above described components can be put together into transformation vectors. Transformation vectors are usually comprised of a selectable marker that is either maintained in a replicon or developed into an integrating vector, as described above.

[0133] Expression and transformation vectors, either extrachromosomal replicons or integrating vectors, have been developed for transformation into many yeasts. For example, expression vectors and methods of introducing exogenous DNA into yeast hosts have been developed for, inter alia, the following yeasts: Candida albicans (Kurtz, et al. (1986) Mol. Cell. Biol. 6:142); Candida maltosa (Kunze, et al. (1985) J. Basic Microbiol. 25:141); Hansenula polymorpha (Gleeson, et al. (1986) J. Gen. Microbiol. 132:3459; Roggenkamp et al. (1986) Mol. Gen. Genet. 202:302); Kluyveromyces fragilis (Das, et al. (1984) J. Bacteriol. 158:1165); Kluyveromyces lactis (De Louvencourt et al. (1983) J. Bacteriol. 154:737; Van den Berg et al. (1990) Bio/Technology 8:135); Pichia guillerimondii (Kunze et al. (1985) J. Basic Microbiol. 25:141); Pichia pastoris (Cregg, et al. (1985) Mol. Cell. Biol. 5:3376; U.S. Pat. Nos. 4,837,148 and 4,929,555); Saccharomyces cerevisiae (Hinnen et al. (1978) Proc. Natl. Acad. Sci. USA 75:1929; Ito et al. (1983) J. Bacteriol. 153:163); Schizosaccharomyces pombe (Beach and Nurse (1981) Nature 300:706); and Yarrowia lipolytica (Davidow, et al. (1985) Curr. Genet. 10:380471 Gaillardin, et al. (1985) Curr. Genet. 10:49).

[0134] Methods of introducing exogenous DNA into yeast hosts are well-known in the art, and usually include either the transformation of spheroplasts or of intact yeast cells treated with alkali cations. Transformation procedures usually vary with the yeast species to be transformed. See e.g., [Kurtz et al. (1986) Mol. Cell. Biol. 6:142; Kunze et al. (1985) J. Basic Microbiol. 25:141; Candida]; [Gleeson et al. (1986) J. Gen. Microbiol. 132:3459; Roggenkamp et al. (1986) Mol. Gen. Genet. 202:302; Hansenula]; [Das et al. (1984) J. Bacteriol. 158:1165; De Louvencourt et al. (1983) J. Bacteriol. 154:1165; Van den Berg et al. (1990) Bio/Technology 8:135; Kluyveromyces]; [Cregg et al. (1985) Mol. Cell. Biol. 5:3376; Kunze et al. (1985) J. Basic Microbiol. 25:141; U.S. Pat. Nos. 4,837,148 and 4,929,555; Pichia]; [Hinnen et al. (1978) Proc. Natl. Acad. Sci. USA 75;1929; Ito et al. (1983) J. Bacteriol. 153:163 Saccharomyces]; [Beach and Nurse (1981) Nature 300:706; Schizosaccharomyces]; [Davidow et al. (1985) Curr. Genet. 10:39; Gaillardin et al. (1985) Curr. Genet. 10:49; Yarrowia].

Definitions

[0135] A composition containing X is “substantially free of” Y when at least 85% by weight of the total X+Y in the composition is X. Preferably, X comprises at least about 90% by weight of the total of X+Y in the composition, more preferably at least about 95% or even 99% by weight.

[0136] The term “heterologous” refers to two biological components that are not found together in nature. The components may be host cells, genes, or regulatory regions, such as promoters. Although the heterologous components are not found together in nature, they can function together, as when a promoter heterologous to a gene is operably linked to the gene. Another example is where a Neisserial sequence is heterologous to a mouse host cell.

[0137] An “origin of replication” is a polynucleotide sequence that initiates and regulates replication of polynucleotides, such as an expression vector. The origin of replication behaves as an autonomous unit of polynucleotide replication within a cell, capable of replication under its own control. An origin of replication may be needed for a vector to replicate in a particular host cell. With certain origins of replication, an expression vector can be reproduced at a high copy number in the presence of the appropriate proteins within the cell. Examples of origins are the autonomously replicating sequences, which are effective in yeast; and the viral T-antigen, effective in COS-7 cells.

[0138] A “mutant” sequence is defined as a DNA, RNA or amino acid sequence differing from but having homology with the native or disclosed sequence. Depending on the particular sequence, the degree of homology between the native or disclosed sequence and the mutant sequence is preferably greater than 50% (e.g., 60%, 70%, 80%, 90%, 95%, 99% or more) which is calculated as described above. As used herein, an “allelic variant” of a nucleic acid molecule, or region, for which nucleic acid sequence is provided herein is a nucleic acid molecule, or region, that occurs at essentially the same locus in the genome of another or second isolate, and that, due to natural variation caused by, for example, mutation or recombination, has a similar but not identical nucleic acid sequence. A coding region allelic variant typically encodes a protein having similar activity to that of the protein encoded by the gene to which it is being compared. An allelic variant can also comprise an alteration in the 5′ or 3′ untranslated regions of the gene, such as in regulatory control regions. (see, for example, U.S. Pat. No. 5,753,235).

Antibodies

[0139] As used herein, the term “antibody” refers to a polypeptide or group of polypeptides composed of at least one antibody combining site. An “antibody combining site” is the three-dimensional binding space with an internal surface shape and charge distribution complementary to the features of an epitope of an antigen, which allows a binding of the antibody with the antigen. “Antibody” includes, for example, vertebrate antibodies, hybrid antibodies, chimeric antibodies, humanized antibodies, altered antibodies, univalent antibodies, Fab proteins, and single domain antibodies.

[0140] Antibodies against the proteins of the invention are useful for affinity chromatography, immunoassays, and distinguishing/identifying Neisseria MenB proteins. Antibodies elicited against the proteins of the present invention bind to antigenic polypeptides or proteins or protein fragments that are present and specifically associated with strains of Neisseria meningitidis MenB. In some instances, these antigens may be associated with specific strains, such as those antigens specific for the MenB strains. The antibodies of the invention may be immobilized to a matrix and utilized in an immunoassay or on an affinity chromatography column, to enable the detection and/or separation of polypeptides, proteins or protein fragments or cells comprising such polypeptides, proteins or protein fragments. Alternatively, such polypeptides, proteins or protein fragments may be immobilized so as to detect antibodies bindably specific thereto.

[0141] Antibodies to the proteins of the invention, both polyclonal and monoclonal, may be prepared by conventional methods. In general, the protein is first used to immunize a suitable animal, preferably a mouse, rat, rabbit or goat. Rabbits and goats are preferred for the preparation of polyclonal sera due to the volume of serum obtainable, and the availability of labeled anti-rabbit and anti-goat antibodies. Immunization is generally performed by mixing or emulsifying the protein in saline, preferably in an adjuvant such as Freund's complete adjuvant, and injecting the mixture or emulsion parenterally (generally subcutaneously or intramuscularly). A dose of 50-200 μg/injection is typically sufficient. Immunization is generally boosted 2-6 weeks later with one or more injections of the protein in saline, preferably using Freund's incomplete adjuvant. One may alternatively generate antibodies by in vitro immunization using methods known in the art, which for the purposes of this invention is considered equivalent to in vivo immunization. Polyclonal antisera is obtained by bleeding the immunized animal into a glass or plastic container, incubating the blood at 25° C. for one hour, followed by incubating at 4° C. for 2-18 hours. The serum is recovered by centrifugation (e.g., 1,000 g for 10 minutes). About 20-50 ml per bleed may be obtained from rabbits.

[0142] Monoclonal antibodies are prepared using the standard method of Kohler & Milstein (Nature (1975) 256:495-96), or a modification thereof. Typically, a mouse or rat is immunized as described above. However, rather than bleeding the animal to extract serum, the spleen (and optionally several large lymph nodes) is removed and dissociated into single cells. If desired, the spleen cells may be screened (after removal of nonspecifically adherent cells) by applying a cell suspension to a plate or well coated with the protein antigen. B-cells that express membrane-bound immunoglobulin specific for the antigen bind to the plate, and are not rinsed away with the rest of the suspension. Resulting B-cells, or all dissociated spleen cells, are then induced to fuse with myeloma cells to form hybridomas, and are cultured in a selective medium (e.g., hypoxanthine, aminopterin, thymidine medium, “HAT”). The resulting hybridomas are plated by limiting dilution, and are assayed for the production of antibodies which bind specifically to the immunizing antigen (and which do not bind to unrelated antigens). The selected MAb-secreting hybridomas are then cultured either in vitro (e.g., in tissue culture bottles or hollow fiber reactors), or in vivo (as ascites in mice).

[0143] If desired, the antibodies (whether polyclonal or monoclonal) may be labeled using conventional techniques. Suitable labels include fluorophores, chromophores, radioactive atoms (particularly ³²P and ¹²⁵I), electron-dense reagents, enzymes, and ligands having specific binding partners. Enzymes are typically detected by their activity. For example, horseradish peroxidase is usually detected by its ability to convert 3,3′,5,5′-tetramethylbenzidine (TMB) to a blue pigment, quantifiable with a spectrophotometer. “Specific binding partner” refers to a protein capable of binding a ligand molecule with high specificity, as for example in the case of an antigen and a monoclonal antibody specific therefor. Other specific binding partners include biotin and avidin or streptavidin, IgG and protein A, and the numerous receptor-ligand couples known in the art. It should be understood that the above description is not meant to categorize the various labels into distinct classes, as the same label may serve in several different modes. For example, ¹²⁵I, may serve as a radioactive label or as an electron-dense reagent. HRP may serve as enzyme or as antigen for a MAb. Further, one may combine various labels for desired effect. For example, MAbs and avidin also require labels in the practice of this invention: thus, one might label a MAb with biotin, and detect its presence with avidin labeled with ¹²⁵I, or with an anti-biotin MAb labeled with HRP. Other permutations and possibilities will be readily apparent to those of ordinary skill in the art, and are considered as equivalents within the scope of the instant invention.

[0144] Antigens, immunogens, polypeptides, proteins or protein fragments of the present invention elicit formation of specific binding partner antibodies. These antigens, immunogens, polypeptides, proteins or protein fragments of the present invention comprise immunogenic compositions of the present invention. Such immunogenic compositions may further comprise or include adjuvants, carriers, or other compositions that promote or enhance or stabilize the antigens, polypeptides, proteins or protein fragments of the present invention. Such adjuvants and carriers will be readily apparent to those of ordinary skill in the art.

Pharmaceutical Compositions

[0145] Pharmaceutical compositions can include either polypeptides, antibodies, or nucleic acid of the invention. The pharmaceutical compositions will comprise a therapeutically effective amount of either polypeptides, antibodies, or polynucleotides of the claimed invention.

[0146] The term “therapeutically effective amount” as used herein refers to an amount of a therapeutic agent to treat, ameliorate, or prevent a desired disease or condition, or to exhibit a detectable therapeutic or preventative effect. The effect can be detected by, for example, chemical markers or antigen levels. Therapeutic effects also include reduction in physical symptoms, such as decreased body temperature, when given to a patient that is febrile. The precise effective amount for a subject will depend upon the subject's size and health, the nature and extent of the condition, and the therapeutics or combination of therapeutics selected for administration. Thus, it is not useful to specify an exact effective amount in advance. However, the effective amount for a given situation can be determined by routine experimentation and is within the judgment of the clinician.

[0147] For purposes of the present invention, an effective dose will be from about 0.01 mg/kg to 50 mg/kg or 0.05 mg/kg to about 10 mg/kg of the DNA constructs in the individual to which it is administered.

[0148] A pharmaceutical composition can also contain a pharmaceutically acceptable carrier. The term “pharmaceutically acceptable carrier” refers to a carrier for administration of a therapeutic agent, such as antibodies or a polypeptide, genes, and other therapeutic agents. The term refers to any pharmaceutical carrier that does not itself induce the production of antibodies harmful to the individual receiving the composition, and which may be administered without undue toxicity. Suitable carriers may be large, slowly metabolized macromolecules such as proteins, polysaccharides, polylactic acids, polyglycolic acids, polymeric amino acids, amino acid copolymers, and inactive virus particles. Such carriers are well known to those of ordinary skill in the art.

[0149] Pharmaceutically acceptable salts can be used therein, for example, mineral acid salts such as hydrochlorides, hydrobromides, phosphates, sulfates, and the like; and the salts of organic acids such as acetates, propionates, malonates, benzoates, and the like. A thorough discussion of pharmaceutically acceptable excipients is available in Remington's Pharmaceutical Sciences (Mack Pub. Co., N.J. 1991).

[0150] Pharmaceutically acceptable carriers in therapeutic compositions may contain liquids such as water, saline, glycerol and ethanol. Additionally, auxiliary substances, such as wetting or emulsifying agents, pH buffering substances, and the like, may be present in such vehicles. Typically, the therapeutic compositions are prepared as injectables, either as liquid solutions or suspensions; solid forms suitable for solution in, or suspension in, liquid vehicles prior to injection may also be prepared. Liposomes are included within the definition of a pharmaceutically acceptable carrier.

Delivery Methods

[0151] Once formulated, the compositions of the invention can be administered directly to the subject. The subjects to be treated can be animals; in particular, human subjects can be treated.

[0152] Direct delivery of the compositions will generally be accomplished by injection, either subcutaneously, intraperitoneally, intravenously or intramuscularly or delivered to the interstitial space of a tissue. The compositions can also be administered into a lesion. Other modes of administration include oral and pulmonary administration, suppositories, and transdermal and transcutaneous applications, needles, and gene guns or hyposprays. Dosage treatment may be a single dose schedule or a multiple dose schedule.

Vaccines

[0153] Vaccines according to the invention may either be prophylactic (i.e., to prevent infection) or therapeutic (i.e., to treat disease after infection).

[0154] Such vaccines comprise immunizing antigen(s) or immunogen(s), immunogenic polypeptide, protein(s) or protein fragments, or nucleic acids (e.g., ribonucleic acid or deoxyribonucleic acid), usually in combination with “pharmaceutically acceptable carriers,” which include any carrier that does not itself induce the production of antibodies harmful to the individual receiving the composition. Suitable carriers are typically large, slowly metabolized macromolecules such as proteins, polysaccharides, polylactic acids, polyglycolic acids, polymeric amino acids, amino acid copolymers, lipid aggregates (such as oil droplets or liposomes), and inactive virus particles. Such carriers are well known to those of ordinary skill in the art. Additionally, these carriers may function as immunostimulating agents (“adjuvants”). Furthermore, the immunogen or antigen may be conjugated to a bacterial toxoid, such as a toxoid from diphtheria, tetanus, cholera, H. pylori, etc. pathogens.

[0155] Preferred adjuvants to enhance effectiveness of the composition include, but are not limited to: (1) aluminum salts (alum), such as aluminum hydroxide, aluminum phosphate, aluminum sulfate, etc.; (2) oil-in-water emulsion formulations (with or without other specific immunostimulating agents such as muramyl peptides (see below) or bacterial cell wall components), such as for example (a) MF59 (PCT Publ. No. WO 90/14837), containing 5% Squalene, 0.5% Tween 80, and 0.5% Span 85 (optionally containing various amounts of MTP-PE (see below), although not required) formulated into submicron particles using a microfluidizer such as Model 110Y microfluidizer (Microfluidics, Newton, Mass.), (b) SAF, containing 10% Squalane, 0.4% Tween 80, 5% pluronic-blocked polymer L121, and thr-MDP (see below) either microfluidized into a submicron emulsion or vortexed to generate a larger particle size emulsion, and (c) Ribi™ adjuvant system (RAS), (Ribi Immunochem, Hamilton, Mont.) containing 2% Squalene, 0.2% Tween 80, and one or more bacterial cell wall components from the group consisting of monophosphorylipid A (MPL), trehalose dimycolate (TDM), and cell wall skeleton (CWS), preferably MPL+CWS (Detox™); (3) saponin adjuvants, such as Stimulon™ (Cambridge Bioscience, Worcester, Mass.) may be used or particles generated therefrom such as ISCOMs (immunostimulating complexes); (4) Complete Freund's Adjuvant (CFA) and Incomplete Freund's Adjuvant (IFA); (5) cytokines, such as interleukins (e.g., IL-1, IL-2, IL-4, IL-5, IL-6, IL-7, IL-12, etc.), interferons (e.g., gamma interferon), macrophage colony stimulating factor (M-CSF), tumor necrosis factor (TNF), etc; (6) detoxified mutants of a bacterial ADP-ribosylating toxin such as a cholera toxin (CT), a pertussis toxin (PT), or an E. coli heat-labile toxin (LT), particularly LT-K63, LT-R72, CT-S109, PT-K9/G129; see, e.g., WO 93/13302 and WO 92/19265; and (7) other substances that act as immunostimulating agents to enhance the effectiveness of the composition. Alum and MF59 are preferred.

[0156] As mentioned above, muramyl peptides include, but are not limited to, N-acetyl-muramyl-L-threonyl-D-isoglutamine (thr-MDP), N-acetyl-normuramyl-1-alanyl-d-isoglutamine (nor-MDP), N-acetylmuramyl-1-alanyl-d-isoglutaminyl-1-alanine-2-(1′-2′-dipalmitoyl-sn-glycero-3-huydroxyphosphoryloxy)-ethylamine (MTP-PE), etc.

[0157] The vaccine compositions comprising immunogenic compositions (e.g., which may include the antigen, pharmaceutically acceptable carrier, and adjuvant) typically will contain diluents, such as water, saline, glycerol, ethanol, etc. Additionally, auxiliary substances, such as wetting or emulsifying agents, pH buffering substances, and the like, may be present in such vehicles. Alternatively, vaccine compositions comprising immunogenic compositions may comprise an antigen, polypeptide, protein, protein fragment or nucleic acid in a pharmaceutically acceptable carrier.

[0158] More specifically, vaccines comprising immunogenic compositions comprise an immunologically effective amount of the immunogenic polypeptides, as well as any other of the above-mentioned components, as needed. By “immunologically effective amount”, it is meant that the administration of that amount to an individual, either in a single dose or as part of a series, is effective for treatment or prevention. This amount varies depending upon the health and physical condition of the individual to be treated, the taxonomic group of individual to be treated (e.g., nonhuman primate, primate, etc.), the capacity of the individual's immune system to synthesize antibodies, the degree of protection desired, the formulation of the vaccine, the treating doctor's assessment of the medical situation, and other relevant factors. It is expected that the amount will fall in a relatively broad range that can be determined through routine trials.

[0159] Typically, the vaccine compositions or immunogenic compositions are prepared as injectables, either as liquid solutions or suspensions; solid forms suitable for solution in, or suspension in, liquid vehicles prior to injection may also be prepared. The preparation also may be emulsified or encapsulated in liposomes for enhanced adjuvant effect, as discussed above under pharmaceutically acceptable carriers.

[0160] The immunogenic compositions are conventionally administered parenterally, e.g., by injection, either subcutaneously or intramuscularly. Additional formulations suitable for other modes of administration include oral and pulmonary formulations, suppositories, and transdermal and transcutaneous applications. Dosage treatment may be a single dose schedule or a multiple dose schedule. The vaccine may be administered in conjunction with other immunoregulatory agents.

[0161] As an alternative to protein-based vaccines, DNA vaccination may be employed (e.g., Robinson & Torres (1997) Seminars in Immunology 9:271-283; Donnelly et al. (1997) Annu Rev Immunol 15:617-648).

Gene Delivery Vehicles

[0162] Gene therapy vehicles for delivery of constructs, including a coding sequence of a therapeutic of the invention, to be delivered to the mammal for expression in the mammal, can be administered either locally or systemically. These constructs can utilize viral or non-viral vector approaches in in vivo or ex vivo modality. Expression of such coding sequence can be induced using endogenous mammalian or heterologous promoters. Expression of the coding sequence in vivo can be either constitutive or regulated.

[0163] The invention includes gene delivery vehicles capable of expressing the contemplated nucleic acid sequences. The gene delivery vehicle is preferably a viral vector and, more preferably, a retroviral, adenoviral, adeno-associated viral (AAV), herpes viral, or alphavirus vector. The viral vector can also be an astrovirus, coronavirus, orthomyxovirus, papovavirus, paramyxovirus, parvovirus, picornavirus, poxvirus, or togavirus viral vector. See generally, Jolly (1994) Cancer Gene Therapy 1:51-64; Kimura (1994) Human Gene Therapy 5:845-852; Connelly (1995) Human Gene Therapy 6:185-193; and Kaplitt (1994) Nature Genetics 6:148-153.

[0164] Retroviral vectors are well known in the art, including B, C and D type retroviruses, xenotropic retroviruses (for example, NZB-X1, NZB-X2 and NZB9-1 (see O'Neill (1985) J. Virol. 53:160) polytropic retroviruses e.g., MCF and MCF-MLV (see Kelly (1983) J. Virol. 45:291), spumaviruses and lentiviruses. See RNA Tumor Viruses, Second Edition, Cold Spring Harbor Laboratory, 1985.

[0165] Portions of the retroviral gene therapy vector may be derived from different retroviruses. For example, retrovector LTRs may be derived from a Murine Sarcoma Virus, a tRNA binding site from a Rous Sarcoma Virus, a packaging signal from a Murine Leukemia Virus, and an origin of second strand synthesis from an Avian Leukosis Virus.

[0166] These recombinant retroviral vectors may be used to generate transduction competent retroviral vector particles by introducing them into appropriate packaging cell lines (see U.S. Pat. No. 5,591,624). Retrovirus vectors can be constructed for site-specific integration into host cell DNA by incorporation of a chimeric integrase enzyme into the retroviral particle (see WO96/37626). It is preferable that the recombinant viral vector is a replication defective recombinant virus.

[0167] Packaging cell lines suitable for use with the above-described retrovirus vectors are well known in the art, are readily prepared (see WO95/30763 and WO92/05266), and can be used to create producer cell lines (also termed vector cell lines or “VCLs”) for the production of recombinant vector particles. Preferably, the packaging cell lines are made from human parent cells (e.g., HT1080 cells) or mink parent cell lines, which eliminates inactivation in human serum.

[0168] Preferred retroviruses for the construction of retroviral gene therapy vectors include Avian Leukosis Virus, Bovine Leukemia, Virus, Murine Leukemia Virus, Mink-Cell Focus-Inducing Virus, Murine Sarcoma Virus, Reticuloendotheliosis Virus and Rous Sarcoma Virus. Particularly preferred Murine Leukemia Viruses include 4070A and 1504A (Hartley and Rowe (1976) J Virol 19:19-25), Abelson (ATCC No. VR-999), Friend (ATCC No. VR-245), Graffi, Gross (ATCC No. VR-590), Kirsten, Harvey Sarcoma Virus and Rauscher (ATCC No. VR-998) and Moloney Murine Leukemia Virus (ATCC No. VR-190). Such retroviruses may be obtained from depositories or collections such as the American Type Culture Collection (“ATCC”) in Rockville, Md. or isolated from known sources using commonly available techniques.

[0169] Exemplary known retroviral gene therapy vectors employable in this invention include those described in patent applications GB2200651, EP0415731, EP0345242, EP0334301, WO89/02468; WO89/05349, WO89/09271, WO90/02806, WO90/07936, WO94/03622, WO93/25698, WO93/25234, WO93/11230, WO93/10218, WO91/02805, WO91/02825, WO95/07994, U.S. Pat. No. 5,219,740, U.S. Pat. No. 4,405,712, U.S. Pat. No. 4,861,719, U.S. Pat. No. 4,980,289, U.S. Pat. No. 4,777,127, U.S. Pat. No. 5,591,624. See also Vile (1993) Cancer Res 53:3860-3864; Vile (1993) Cancer Res 53:962-967; Ram (1993) Cancer Res 53 (1993) 83-88; Takamiya (1992) J Neurosci Res 33:493-503; Baba (1993) J Neurosurg 79:729-735; Mann (1983) Cell 33:153; Cane (1984) Proc Natl Acad Sci 81:6349; and Miller (1990) Human Gene Therapy 1.

[0170] Human adenoviral gene therapy vectors are also known in the art and employable in this invention. See, for example, Berkner (1988) Biotechniques 6:616 and Rosenfeld (1991) Science 252:431, and WO93/07283, WO93/06223, and WO93/07282. Exemplary known adenoviral gene therapy vectors employable in this invention include those described in the above referenced documents and in WO94/12649, WO93/03769, WO93/19191, WO94/28938, WO95/1 1984, WO95/00655, WO95/27071, WO95/29993, WO95/34671, WO96/05320, WO94/08026, WO94/1 1506, WO93/06223, WO94/24299, WO95/14102, WO95/24297, WO95/02697, WO94/28152, WO94/24299, WO95/09241, WO95/25807, WO95/05835, WO94/18922 and WO95/09654. Alternatively, administration of DNA linked to killed adenovirus as described in Curiel (1992) Hum. Gene Ther. 3:147-154 may be employed. The gene delivery vehicles of the invention also include adenovirus associated virus (AAV) vectors. Leading and preferred examples of such vectors for use in this invention are the AAV-2 based vectors disclosed in Srivastava, WO93/09239. Most preferred AAV vectors comprise the two AAV inverted terminal repeats in which the native D-sequences are modified by substitution of nucleotides, such that at least 5 native nucleotides and up to 18 native nucleotides, preferably at least 10 native nucleotides up to 18 native nucleotides, most preferably 10 native nucleotides are retained and the remaining nucleotides of the D-sequence are deleted or replaced with non-native nucleotides. The native D-sequences of the AAV inverted terminal repeats are sequences of 20 consecutive nucleotides in each AAV inverted terminal repeat (i.e., there is one sequence at each end) which are not involved in HP formation. The non-native replacement nucleotide may be any nucleotide other than the nucleotide found in the native D-sequence in the same position. Other employable exemplary AAV vectors are pWP-19, pWN-1, both of which are disclosed in Nahreini (1993) Gene 124:257-262. Another example of such an AAV vector is psub201 (see Samulski (1987) J. Virol. 61:3096). Another exemplary AAV vector is the Double-D ITR vector. Construction of the Double-D ITR vector is disclosed in U.S. Pat. No. 5,478,745. Still other vectors are those disclosed in Carter U.S. Pat. No. 4,797,368 and Muzyczka U.S. Pat. No. 5,139,941, Chartejee U.S. Pat. No. 5,474,935, and Kotin WO94/288157. Yet a further example of an AAV vector employable in this invention is SSV9AFABTKneo, which contains the AFP enhancer and albumin promoter and directs expression predominantly in the liver. Its structure and construction are disclosed in Su (1996) Human Gene Therapy 7:463-470. Additional AAV gene therapy vectors are described in U.S. Pat. No. 5,354,678, U.S. Pat. No. 5,173,414, U.S. Pat. No. 5,139,941, and U.S. Pat. No. 5,252,479.

[0171] The gene therapy vectors comprising sequences of the invention also include herpes vectors. Leading and preferred examples are herpes simplex virus vectors containing a sequence encoding a thymidine kinase polypeptide such as those disclosed in U.S. Pat. No. 5,288,641 and EP0176170 (Roizman). Additional exemplary herpes simplex virus vectors include HFEM/ICP6-LacZ disclosed in WO95/04139 (Wistar Institute), pHSVlac described in Geller (1988) Science 241:1667-1669 and in WO90/09441 and WO92/07945, HSV Us3::pgC-lacZ described in Fink (1992) Human Gene Therapy 3:11-19 and HSV 7134, 2 RH 105 and GAL4 described in EP 0453242 (Breakefield), and those deposited with the ATCC as accession numbers ATCC VR-977 and ATCC VR-260.

[0172] Also contemplated are alpha virus gene therapy vectors that can be employed in this invention. Preferred alpha virus vectors are Sindbis viruses vectors. Togaviruses, Semliki Forest virus (ATCC VR-67; ATCC VR-1247), Middleberg virus (ATCC VR-370), Ross River virus (ATCC VR-373; ATCC VR-1246), Venezuelan equine encephalitis virus (ATCC VR923; ATCC VR-1250; ATCC VR-1249; ATCC VR-532), and those described in U.S. Pat. Nos. 5,091,309, 5,217,879, and WO92/10578. More particularly, those alpha virus vectors described in U.S. Ser. No. 08/405,627, filed Mar. 15, 1995,WO94/21792, WO92/10578, WO95/07994, U.S. Pat. No. 5,091,309 and U.S. Pat. No. 5,217,879 are employable. Such alpha viruses may be obtained from depositories or collections such as the ATCC in Rockville, Md. or isolated from known sources using commonly available techniques. Preferably, alphavirus vectors with reduced cytotoxicity are used (see U.S. Ser. No. 08/679640).

[0173] DNA vector systems such as eukarytic layered expression systems are also useful for expressing the nucleic acids of the invention. See WO95/07994 for a detailed description of eukaryotic layered expression systems. Preferably, the eukaryotic layered expression systems of the invention are derived from alphavirus vectors and most preferably from Sindbis viral vectors.

[0174] Other viral vectors suitable for use in the present invention include those derived from poliovirus, for example ATCC VR-58 and those described in Evans, Nature 339 (1989) 385 and Sabin (1973) J. Biol. Standardization 1:115; rhinovirus, for example ATCC VR-1110 and those described in Arnold (1990) J Cell Biochem L401; pox viruses such as canary pox virus or vaccinia virus, for example ATCC VR-111 and ATCC VR-2010 and those described in Fisher-Hoch (1989) Proc Natl Acad Sci 86:317; Flexner (1989) Ann NY Acad Sci 569:86, Flexner (1990) Vaccine 8:17; in U.S. Pat. No. 4,603,112 and U.S. Pat. No. 4,769,330 and WO89/01973; SV40 virus, for example ATCC VR-305 and those described in Mulligan (1979) Nature 277:108 and Madzak (1992) J Gen Virol 73:1533; influenza virus, for example ATCC VR-797 and recombinant influenza viruses made employing reverse genetics techniques as described in U.S. Pat. No. 5,166,057 and in Enami (1990) Proc Natl Acad Sci 87:3802-3805; Enami & Palese (1991) J Virol 65:2711-2713 and Luytjes (1989) Cell 59:110, (see also McMichael (1983) NEJ Med 309:13, and Yap (1978) Nature 273:238 and Nature (1979) 277:108); human immunodeficiency virus as described in EP-0386882 and in Buchschacher (1992) J. Virol. 66:2731; measles virus, for example ATCC VR-67 and VR-1247 and those described in EP-0440219; Aura virus, for example ATCC VR-368; Bebaru virus, for example ATCC VR-600 and ATCC VR-1240; Cabassou virus, for example ATCC VR-922; Chikungunya virus, for example ATCC VR-64 and ATCC VR-1241; Fort Morgan Virus, for example ATCC VR-924; Getah virus, for example ATCC VR-369 and ATCC VR-1243; Kyzylagach virus, for example ATCC VR-927; Mayaro virus, for example ATCC VR-66; Mucambo virus, for example ATCC VR-580 and ATCC VR-1244; Ndumu virus, for example ATCC VR-371; Pixuna virus, for example ATCC VR-372 and ATCC VR-1245; Tonate virus, for example ATCC VR-925; Triniti virus, for example ATCC VR-469; Una virus, for example ATCC VR-374; Whataroa virus, for example ATCC VR-926; Y-62-33 virus, for example ATCC VR-375; O'Nyong virus, Eastern encephalitis virus, for example ATCC VR-65 and ATCC VR-1242; Western encephalitis virus, for example ATCC VR-70, ATCC VR-1251, ATCC VR-622 and ATCC VR-1252; and coronavirus, for example ATCC VR-740 and those described in Hamre (1966) Proc Soc Exp Biol Med 121:190.

[0175] Delivery of the compositions of this invention into cells is not limited to the above mentioned viral vectors. Other delivery methods and media may be employed such as, for example, nucleic acid expression vectors, polycationic condensed DNA linked or unlinked to killed adenovirus alone, for example see U.S. Ser. No. 08/366,787, filed Dec. 30, 1994 and Curiel (1992) Hum Gene Ther 3:147-154 ligand linked DNA, for example see Wu (1989) J Biol Chem 264:16985-16987, eucaryotic cell delivery vehicles cells, for example see U.S. Ser. No.08/240,030, filed May 9, 1994, and U.S. Ser. No. 08/404,796, deposition of photopolymerized hydrogel materials, hand-held gene transfer particle gun, as described in U.S. Pat. No. 5,149,655, ionizing radiation as described in U.S. Pat. No. 5,206,152 and in WO92/11033, nucleic charge neutralization or fusion with cell membranes. Additional approaches are described in Philip (1994) Mol Cell Biol 14:2411-2418 and in Woffendin (1994) Proc Natl Acad Sci 91:1581-1585.

[0176] Particle mediated gene transfer may be employed, for example see U.S. Ser. No. 60/023,867. Briefly, the sequence can be inserted into conventional vectors that contain conventional control sequences for high level expression, and then incubated with synthetic gene transfer molecules such as polymeric DNA-binding cations like polylysine, protamine, and albumin, linked to cell targeting ligands such as asialoorosomucoid, as described in Wu & Wu (1987) J. Biol. Chem. 262:4429-4432, insulin as described in Hucked (1990) Biochem Pharmacol 40:253-263, galactose as described in Plank (1992) Bioconjugate Chem 3:533-539, lactose or transferrin.

[0177] Naked DNA may also be employed to transform a host cell. Exemplary naked DNA introduction methods are described in WO 90/11092 and U.S. Pat. No. 5,580,859. Uptake efficiency may be improved using biodegradable latex beads. DNA coated latex beads are efficiently transported into cells after endocytosis initiation by the beads. The method may be improved further by treatment of the beads to increase hydrophobicity and thereby facilitate disruption of the endosome and release of the DNA into the cytoplasm.

[0178] Liposomes that can act as gene delivery vehicles are described in U.S. Pat. No. 5,422,120, WO95/13796, WO94/23697, WO91/14445 and EP-524,968. As described in U.S. Ser. No. 60/023,867, on non-viral delivery, the nucleic acid sequences encoding a polypeptide can be inserted into conventional vectors that contain conventional control sequences for high level expression, and then be incubated with synthetic gene transfer molecules such as polymeric DNA-binding cations like polylysine, protamine, and albumin, linked to cell targeting ligands such as asialoorosomucoid, insulin, galactose, lactose, or transferrin. Other delivery systems include the use of liposomes to encapsulate DNA comprising the gene under the control of a variety of tissue-specific or ubiquitously-active promoters. Further non-viral delivery suitable for use includes mechanical delivery systems such as the approach described in Woffendin et al (1994) Proc. Natl. Acad. Sci. USA 91(24):11581-11585. Moreover, the coding sequence and the product of expression of such can be delivered through deposition of photopolymerized hydrogel materials. Other conventional methods for gene delivery that can be used for delivery of the coding sequence include, for example, use of hand-held gene transfer particle gun, as described in U.S. Pat. No. 5,149,655; use of ionizing radiation for activating transferred gene, as described in U.S. Pat. No. 5,206,152 and WO92/11033

[0179] Exemplary liposome and polycationic gene delivery vehicles are those described in U.S. Pat. Nos. 5,422,120 and 4,762,915; in WO 95/13796; WO94/23697; and WO91/14445; in EP-0524968; and in Stryer, Biochemistry, pages 236-240 (1975) W. H. Freeman, San Francisco; Szoka (1980) Biochem Biophys Acta 600: 1; Bayer (1979) Biochem Biophys Acta 550:464; Rivnay (1987) Meth Enzymol 149:119; Wang (1987) Proc Natl Acad Sci 84:7851; Plant (1989) Anal Biochem 176:420.

[0180] A polynucleotide composition can comprise a therapeutically effective amount of a gene therapy vehicle, as the term is defined above. For purposes of the present invention, an effective dose will be from about 0.01 mg/kg to 50 mg/kg or 0.05 mg/kg to about 10 mg/kg of the DNA constructs in the individual to which it is administered.

Delivery Methods

[0181] Once formulated, the polynucleotide compositions of the invention can be administered (1) directly to the subject; (2) delivered ex vivo, to cells derived from the subject; or (3) in vitro for expression of recombinant proteins. The subjects to be treated can be mammals or birds. Also, human subjects can be treated.

[0182] Direct delivery of the compositions will generally be accomplished by injection, either subcutaneously, intraperitoneally, transdermally or transcutaneously, intravenously or intramuscularly or delivered to the interstitial space of a tissue. The compositions can also be administered into a tumor or lesion. Other modes of administration include oral and pulmonary administration, suppositories, and transdermal applications, needles, and gene guns or hyposprays. Dosage treatment may be a single dose schedule or a multiple dose schedule. See WO98/20734.

[0183] Methods for the ex vivo delivery and reimplantation of transformed cells into a subject are known in the art and described in e.g., WO93/14778. Examples of cells useful in ex vivo applications include, for example, stem cells, particularly hematopoetic, lymph cells, macrophages, dendritic cells, or tumor cells.

[0184] Generally, delivery of nucleic acids for both ex vivo and in vitro applications can be accomplished by the following procedures, for example, dextran-mediated transfection, calcium phosphate precipitation, polybrene mediated transfection, protoplast fusion, electroporation, encapsulation of the polynucleotide(s) in liposomes, and direct microinjection of the DNA into nuclei, all well known in the art.

Polynucleotide and Polypeptide Pharmaceutical Compositions

[0185] In addition to the pharmaceutically acceptable carriers and salts described above, the following additional agents can be used with polynucleotide and/or polypeptide compositions.

A. Polypeptides

[0186] One example are polypeptides which include, without limitation: asialoorosomucoid (ASOR); transferrin; asialoglycoproteins; antibodies; antibody fragments; ferritin; interleukins; interferons, granulocyte, macrophage colony stimulating factor (GM-CSF), granulocyte colony stimulating factor (G-CSF), macrophage colony stimulating factor (M-CSF), stem cell factor and erythropoietin. Viral antigens, such as envelope proteins, can also be used. Also, proteins from other invasive organisms, such as the 17 amino acid peptide from the circumsporozoite protein of plasmodium falciparum known as RII.

B. Hormones, Vitamins, Etc.

[0187] Other groups that can be included in a pharmaceutical composition include, for example: hormones, steroids, androgens, estrogens, thyroid hormone, or vitamins, folic acid.

C. Polyalkylenes, Polysaccharides, Etc.

[0188] Also, polyalkylene glycol can be included in a pharmaceutical compositions with the desired polynucleotides and/or polypeptides. In a preferred embodiment, the polyalkylene glycol is polyethlylene glycol. In addition, mono-, di-, or polysaccarides can be included. In a preferred embodiment of this aspect, the polysaccharide is dextran or DEAE-dextran. Also, chitosan and poly(lactide-co-glycolide) may be included in a pharmaceutical composition.

D. Lipids, and Liposomes

[0189] The desired polynucleotide or polypeptide can also be encapsulated in lipids or packaged in liposomes prior to delivery to the subject or to cells derived therefrom.

[0190] Lipid encapsulation is generally accomplished using liposomes which are able to stably bind or entrap and retain nucleic acid or polypeptide. The ratio of condensed polynucleotide to lipid preparation can vary but will generally be around 1:1 (mg DNA:micromoles lipid), or more of lipid. For a review of the use of liposomes as carriers for delivery of nucleic acids, see, Hug and Sleight (1991) Biochim. Biophys. Acta. 1097:1-17; Straubinger (1983) Meth. Enzymol. 101:512-527.

[0191] Liposomal preparations for use in the present invention include cationic (positively charged), anionic (negatively charged) and neutral preparations. Cationic liposomes have been shown to mediate intracellular delivery of plasmid DNA (Felgner (1987) Proc. Natl. Acad. Sci. USA 84:7413-7416); mRNA (Malone (1989) Proc. Natl. Acad. Sci. USA 86:6077-6081); and purified transcription factors (Debs (1990) J. Biol. Chem. 265:10189-10192), in functional form.

[0192] Cationic liposomes are readily available. For example, N(1-2,3-dioleyloxy)propyl)-N,N,N-triethylammonium (DOTMA) liposomes are available under the trademark Lipofectin, from GIBCO BRL, Grand Island, N.Y. (See, also, Felgner supra). Other commercially available liposomes include transfectace (DDAB/DOPE) and DOTAP/DOPE (Boerhinger). Other cationic liposomes can be prepared from readily available materials using techniques well known in the art. See, e.g., Szoka (1978) Proc. Natl. Acad. Sci. USA 75:4194-4198; WO90/11092 for a description of the synthesis of DOTAP (1,2-bis(oleoyloxy)-3-(trimethylammonio)propane) liposomes.

[0193] Similarly, anionic and neutral liposomes are readily available, such as from Avanti Polar Lipids (Birmingham, Ala.), or can be easily prepared using readily available materials. Such materials include phosphatidyl choline, cholesterol, phosphatidyl ethanolamine, dioleoylphosphatidyl choline (DOPC), dioleoylphosphatidyl glycerol (DOPG), dioleoylphoshatidyl ethanolamine (DOPE), among others. These materials can also be mixed with the DOTMA and DOTAP starting materials in appropriate ratios. Methods for making liposomes using these materials are well known in the art.

[0194] The liposomes can comprise multilammelar vesicles (MLVs), small unilamellar vesicles (SUVs), or large unilamellar vesicles (LUVs). The various liposome-nucleic acid complexes are prepared using methods known in the art. See e.g., Straubinger (1983) Meth. Immunol. 101:512-527; Szoka (1978) Proc. Natl. Acad. Sci. USA 75:4194-4198; Papahadjopoulos (1975) Biochim. Biophys. Acta 394:483; Wilson (1979) Cell 17:77); Deamer & Bangham (1976) Biochim. Biophys. Acta 443:629; Ostro (1977) Biochem. Biophys. Res. Commun. 76:836; Fraley (1979) Proc. Natl. Acad. Sci. USA 76:3348); Enoch & Strittmatter (1979) Proc. Natl. Acad. Sci. USA 76:145; Fraley (1980) J. Biol. Chem. (1980) 255:10431; Szoka & Papahadjopoulos (1978) Proc. Natl. Acad. Sci. USA 75:145; and Schaefer-Ridder (1982) Science 215:166.

E. Lipoproteins

[0195] In addition, lipoproteins can be included with the polynucleotide or polypeptide to be delivered. Examples of lipoproteins to be utilized include: chylomicrons, HDL, IDL, LDL, and VLDL. Mutants, fragments, or fusions of these proteins can also be used. Also, modifications of naturally occurring lipoproteins can be used, such as acetylated LDL. These lipoproteins can target the delivery of polynucleotides to cells expressing lipoprotein receptors. Preferably, if lipoproteins are including with the polynucleotide to be delivered, no other targeting ligand is included in the composition.

[0196] Naturally occurring lipoproteins comprise a lipid and a protein portion. The protein portion are known as apoproteins. At the present, apoproteins A, B, C, D, and E have been isolated and identified. At least two of these contain several proteins, designated by Roman numerals, AI, AII, AIV; CI, CII, CIII.

[0197] A lipoprotein can comprise more than one apoprotein. For example, naturally occurring chylomicrons comprises of A, B, C, and E; over time these lipoproteins lose A and acquire C and E apoproteins. VLDL comprises A, B, C, and E apoproteins, LDL comprises apoprotein B; and HDL comprises apoproteins A, C, and E.

[0198] The amino acid sequences of these apoproteins are known and are described in, for example, Breslow (1985) Annu Rev. Biochem 54:699; Law (1986) Adv. Exp Med. Biol. 151:162; Chen (1986) J Biol Chem 261:12918; Kane (1980) Proc Natl Acad Sci USA 77:2465; and Utermann (1984) Hum Genet 65:232.

[0199] Lipoproteins contain a variety of lipids including, triglycerides, cholesterol (free and esters), and phopholipids. The composition of the lipids varies in naturally occurring lipoproteins. For example, chylomicrons comprise mainly triglycerides. A more detailed description of the lipid content of naturally occurring lipoproteins can be found, for example, in Meth. Enzymol. 128 (1986). The composition of the lipids are chosen to aid in conformation of the apoprotein for receptor binding activity. The composition of lipids can also be chosen to facilitate hydrophobic interaction and association with the polynucleotide binding molecule.

[0200] Naturally occurring lipoproteins can be isolated from serum by ultracentrifugation, for instance. Such methods are described in Meth. Enzymol. (supra); Pitas (1980) J. Biochem. 255:5454-5460 and Mahey (1979) J Clin. Invest 64:743-750.

[0201] Lipoproteins can also be produced by in vitro or recombinant methods by expression of the apoprotein genes in a desired host cell. See, for example, Atkinson (1986) Annu Rev Biophys Chem 15:403 and Radding (1958) Biochim Biophys Acta 30: 443.

[0202] Lipoproteins can also be purchased from commercial suppliers, such as Biomedical Technologies, Inc., Stoughton, Mass., USA.

[0203] Further description of lipoproteins can be found in Zuckermann et al., PCT. Appln. No. US97/14465.

F. Polycationic Agents

[0204] Polycationic agents can be included, with or without lipoprotein, in a composition with the desired polynucleotide and/or polypeptide to be delivered.

[0205] Polycationic agents, typically, exhibit a net positive charge at physiological relevant pH and are capable of neutralizing the electrical charge of nucleic acids to facilitate delivery to a desired location. These agents have both in vitro, ex vivo, and in vivo applications. Polycationic agents can be used to deliver nucleic acids to a living subject either intramuscularly, subcutaneously, etc.

[0206] The following are examples of useful polypeptides as polycationic agents: polylysine, polyarginine, polyornithine, and protamine. Other examples of useful polypeptides include histones, protamines, human serum albumin, DNA binding proteins, non-histone chromosomal proteins, coat proteins from DNA viruses, such as ΦX174, transcriptional factors also contain domains that bind DNA and therefore may be useful as nucleic aid condensing agents. Briefly, transcriptional factors such as C/CEBP, c-jun, c-fos, AP-1, AP-2, AP-3, CPF, Prot-1, Sp-1, Oct-1, Oct-2, CREP, and TFIID contain basic domains that bind DNA sequences.

[0207] Organic polycationic agents include: spermine, spermidine, and purtrescine.

[0208] The dimensions and of the physical properties of a polycationic agent can be extrapolated from the list above, to construct other polypeptide polycationic agents or to produce synthetic polycationic agents.

G. Synthetic Polycationic Agents

[0209] Synthetic polycationic agents which are useful in pharmaceutical compositions include, for example, DEAE-dextran, polybrene. Lipofectin™, and lipofectAMINE™ are monomers that form polycationic complexes when combined with polynucleotides or polypeptides.

Immunodiagnostic Assays

[0210] Neisseria MenB antigens, or antigenic fragments thereof, of the invention can be used in immunoassays to detect antibody levels (or, conversely, anti-Neisseria MenB antibodies can be used to detect antigen levels). Immunoassays based on well defined, recombinant antigens can be developed to replace invasive diagnostics methods. Antibodies to Neisseria MenB proteins or fragments thereof within biological samples, including for example, blood or serum samples, can be detected. Design of the immunoassays is subject to a great deal of variation, and a variety of these are known in the art. Protocols for the immunoassay may be based, for example, upon competition, or direct reaction, or sandwich type assays. Protocols may also, for example, use solid supports, or may be by immunoprecipitation. Most assays involve the use of labeled antibody or polypeptide; the labels may be, for example, fluorescent, chemiluminescent, radioactive, or dye molecules. Assays which amplify the signals from the probe are also known; examples of which are assays which utilize biotin and avidin, and enzyme-labeled and mediated immunoassays, such as ELISA assays.

[0211] Kits suitable for immunodiagnosis and containing the appropriate labeled reagents are constructed by packaging the appropriate materials, including the compositions of the invention, in suitable containers, along with the remaining reagents and materials (for example, suitable buffers, salt solutions, etc.) required for the conduct of the assay, as well as suitable set of assay instructions.

Nucleic Acid Hybridization

[0212] “Hybridization” refers to the association of two nucleic acid sequences to one another by hydrogen bonding. Typically, one sequence will be fixed to a solid support and the other will be free in solution. Then, the two sequences will be placed in contact with one another under conditions that favor hydrogen bonding. Factors that affect this bonding include: the type and volume of solvent; reaction temperature; time of hybridization; agitation; agents to block the non-specific attachment of the liquid phase sequence to the solid support (Denhardt's reagent or BLOTTO); concentration of the sequences; use of compounds to increase the rate of association of sequences (dextran sulfate or polyethylene glycol); and the stringency of the washing conditions following hybridization. See Sambrook et al. (supra) Volume 2, chapter 9, pages 9.47 to 9.57.

[0213] “Stringency” refers to conditions in a hybridization reaction that favor association of very similar sequences over sequences that differ. For example, the combination of temperature and salt concentration should be chosen that is approximately 120 to 200° C. below the calculated Tm of the hybrid under study. The temperature and salt conditions can often be determined empirically in preliminary experiments in which samples of genomic DNA immobilized on filters are hybridized to the sequence of interest and then washed under conditions of different stringencies. See Sambrook et al. at page 9.50.

[0214] Variables to consider when performing, for example, a Southern blot are (1) the complexity of the DNA being blotted and (2) the homology between the probe and the sequences being detected. The total amount of the fragment(s) to be studied can vary a magnitude of 10, from 0.1 to 1 μg for a plasmid or phage digest to 10⁻⁹ to 10⁻⁸ g for a single copy gene in a highly complex eukaryotic genome. For lower complexity polynucleotides, substantially shorter blotting, hybridization, and exposure times, a smaller amount of starting polynucleotides, and lower specific activity of probes can be used. For example, a single-copy yeast gene can be detected with an exposure time of only 1 hour starting with 1 μg of yeast DNA, blotting for two hours, and hybridizing for 4-8 hours with a probe of 10⁸ cpm/μg. For a single-copy mammalian gene a conservative approach would start with 10 μg of DNA, blot overnight, and hybridize overnight in the presence of 10% dextran sulfate using a probe of greater than 10⁸ cpm/μg, resulting in an exposure time of ˜24 hours.

[0215] Several factors can affect the melting temperature (Tm) of a DNA-DNA hybrid between the probe and the fragment of interest, and consequently, the appropriate conditions for hybridization and washing. In many cases the probe is not 100% homologous to the fragment. Other commonly encountered variables include the length and total G+C content of the hybridizing sequences and the ionic strength and formamide content of the hybridization buffer. The effects of all of these factors can be approximated by a single equation:
Tm=81+16.6(log₁₀Ci)+0.4(% (G+C))−0.6(% formamide)−600/n−1.5(% mismatch)
where Ci is the salt concentration (monovalent ions) and n is the length of the hybrid in base pairs (slightly modified from Meinkoth & Wahl (1984) Anal. Biochem. 138:267-284).

[0216] In designing a hybridization experiment, some factors affecting nucleic acid hybridization can be conveniently altered. The temperature of the hybridization and washes and the salt concentration during the washes are the simplest to adjust. As the temperature of the hybridization increases (i.e., stringency), it becomes less likely for hybridization to occur between strands that are nonhomologous, and as a result, background decreases. If the radiolabeled probe is not completely homologous with the immobilized fragment (as is frequently the case in gene family and interspecies hybridization experiments), the hybridization temperature must be reduced, and background will increase. The temperature of the washes affects the intensity of the hybridizing band and the degree of background in a similar manner. The stringency of the washes is also increased with decreasing salt concentrations.

[0217] In general, convenient hybridization temperatures in the presence of 50% formamide are 42° C. for a probe with is 95% to 100% homologous to the target fragment, 37° C. for 90% to 95% homology, and 32° C. for 85% to 90% homology. For lower homologies, formamide content should be lowered and temperature adjusted accordingly, using the equation above. If the homology between the probe and the target fragment are not known, the simplest approach is to start with both hybridization and wash conditions which are nonstringent. If non-specific bands or high background are observed after autoradiography, the filter can be washed at high stringency and reexposed. If the time required for exposure makes this approach impractical, several hybridization and/or washing stringencies should be tested in parallel.

Nucleic Acid Probe Assays

[0218] Methods such as PCR, branched DNA probe assays, or blotting techniques utilizing nucleic acid probes according to the invention can determine the presence of cDNA or mRNA. A probe is said to “hybridize” with a sequence of the invention if it can form a duplex or double stranded complex, which is stable enough to be detected.

[0219] The nucleic acid probes will hybridize to the Neisserial nucleotide sequences of the invention (including both sense and antisense strands). Though many different nucleotide sequences will encode the amino acid sequence, the native Neisserial sequence is preferred because it is the actual sequence present in cells. mRNA represents a coding sequence and so a probe should be complementary to the coding sequence; single-stranded cDNA is complementary to mRNA, and so a cDNA probe should be complementary to the non-coding sequence.

[0220] The probe sequence need not be identical to the Neisserial sequence (or its complement)—some variation in the sequence and length can lead to increased assay sensitivity if the nucleic acid probe can form a duplex with target nucleotides, which can be detected. Also, the nucleic acid probe can include additional nucleotides to stabilize the formed duplex. Additional Neisserial sequence may also be helpful as a label to detect the formed duplex. For example, a non-complementary nucleotide sequence may be attached to the 5′ end of the probe, with the remainder of the probe sequence being complementary to a Neisserial sequence. Alternatively, non-complementary bases or longer sequences can be interspersed into the probe, provided that the probe sequence has sufficient complementarity with the a Neisserial sequence in order to hybridize therewith and thereby form a duplex which can be detected.

[0221] The exact length and sequence of the probe will depend on the hybridization conditions, such as temperature, salt condition and the like. For example, for diagnostic applications, depending on the complexity of the analyte sequence, the nucleic acid probe typically contains at least 10-20 nucleotides, preferably 15-25, and more preferably at least 30 nucleotides, although it may be shorter than this. Short primers generally require cooler temperatures to form sufficiently stable hybrid complexes with the template.

[0222] Probes may be produced by synthetic procedures, such as the triester method of Matteucci et al. (J. Am. Chem. Soc. (1981) 103:3185), or according to Urdea et al. (Proc. Natl. Acad. Sci. USA (1983) 80: 7461), or using commercially available automated oligonucleotide synthesizers.

[0223] The chemical nature of the probe can be selected according to preference. For certain applications, DNA or RNA are appropriate. For other applications, modifications may be incorporated e.g., backbone modifications, such as phosphorothioates or methylphosphonates, can be used to increase in vivo half-life, alter RNA affinity, increase nuclease resistance etc. (e.g., see Agrawal & Iyer (1995) Curr Opin Biotechnol 6:12-19; Agrawal (1996) TIBTECH 14:376-387); analogues such as peptide nucleic acids may also be used (e.g., see Corey (1997) TIBTECH 15:224-229; Buchardt et al. (1993) TIBTECH 11:384-386).

[0224] One example of a nucleotide hybridization assay is described by Urdea et al. in international patent application WO92/02526 (see also U.S. Pat. No. 5,124,246).

[0225] Alternatively, the polymerase chain reaction (PCR) is another well-known means for detecting small amounts of target nucleic acids. The assay is described in: Mullis et al. (Meth. Enzyrnol. (1987) 155: 335-350); U.S. Pat. No. 4,683,195; and U.S. Pat. No. 4,683,202. Two “primer” nucleotides hybridize with the target nucleic acids and are used to prime the reaction. The primers can comprise sequence that does not hybridize to the sequence of the amplification target (or its complement) to aid with duplex stability or, for example, to incorporate a convenient restriction site. Typically, such sequence will flank the desired Neisserial sequence.

[0226] A thermostable polymerase creates copies of target nucleic acids from the primers using the original target nucleic acids as a template. After a threshold amount of target nucleic acids are generated by the polymerase, they can be detected by more traditional methods, such as Southern blots. When using the Southern blot method, the labeled probe will hybridize to the Neisserial sequence (or its complement).

[0227] Also, mRNA or cDNA can be detected by traditional blotting techniques described in Sambrook et al (supra). mRNA, or cDNA generated from mRNA using a polymerase enzyme, can be purified and separated using gel electrophoresis. The nucleic acids on the gel are then blotted onto a solid support, such as nitrocellulose. The solid support is exposed to a labeled probe and then washed to remove any unhybridized probe. Next, the duplexes containing the labeled probe are detected. Typically, the probe is labeled with a radioactive moiety.

### EXAMPLES

[0228] The invention is based on the 961 nucleotide sequences from the genome of N. meningitidis set out in Appendix C, SEQ ID NOs:1-961 of the '573 application, which together represent substantially the complete genome of serotype B of N. meningitidis, as well as the full length genome sequence shown in Appendix D, SEQ ID NO 1068 of the '573 application, and the full length genome sequence shown in Appendix A hereto, SEQ ID NO. 1.

[0229] It will be self-evident to the skilled person how this sequence information can be utilized according to the invention, as above described.

[0230] The standard techniques and procedures which may be employed in order to perform the invention (e.g. to utilize the disclosed sequences to predict polypeptides useful for vaccination or diagnostic purposes) were summarized above. This summary is not a limitation on the invention but, rather, gives examples that may be used, but are not required.

[0231] These sequences are derived from contigs shown in Appendix C (SEQ ID NOs 1-961) and from the full length genome sequence shown in Appendix D (SEQ ID NO 1068), which were prepared during the sequencing of the genome of N. meningitidis (strain B). The full length sequence was assembled using the TIGR Assembler as described by G. S. Sutton et al., TIGR Assembler: A New Tool for Assembling Large Shotgun Sequencing Projects, Genome Science and Technology, 1:9-19 (1995) [see also R. D. Fleischmann, et al., Science 269, 496-512 (1995); C. M. Fraser, et al., Science 270, 397-403 (1995); C. J. Bult, et al., Science 273, 1058-73 (1996); C. M. Fraser, et al, Nature 390, 580-586 (1997); J.-F. Tomb, et al., Nature 388, 539-547 (1997); H. P. Klenk, et al., Nature 390, 364-70 (1997); C. M. Fraser, et al., Science 281, 375-88 (1998); M. J. Gardner, et al., Science 282, 1126-1132 (1998); K. E. Nelson, et al., Nature 399, 323-9 (1999)]. Then, using the above-described methods, putative translation products of the sequences were determined. Computer analysis of the translation products were determined based on database comparisons. Corresponding gene and protein sequences, if any, were identified in Neisseria meningitidis (Strain A) and Neisseria gonorrhoeae. Then the proteins were expressed, purified, and characterized to assess their antigenicity and immunogenicity.

[0232] In particular, the following methods were used to express, purify, and biochemically characterize the proteins of the invention.

Chromosomal DNA Preparation

[0233] N. meningitidis strain 2996 was grown to exponential phase in 100 ml of GC medium, harvested by centrifugation, and resuspended in 5 ml buffer (20% Sucrose, 50 mM Tris-HCl, 50 mM EDTA, adjusted to pH 8.0). After 10 minutes incubation on ice, the bacteria were lysed by adding 10 ml lysis solution (50 mM NaCl, 1% Na-Sarkosyl, 50 μg/ml Proteinase K), and the suspension was incubated at 37° C. for 2 hours. Two phenol extractions (equilibrated to pH 8) and one ChCl₃/isoamylalcohol (24:1) extraction were performed. DNA was precipitated by addition of 0.3M sodium acetate and 2 volumes ethanol, and was collected by centrifugation. The pellet was washed once with 70% ethanol and redissolved in 4 ml buffer (10 mM Tris-HCl, 1 mM EDTA, pH 8). The DNA concentration was measured by reading the OD at 260 nm.

Oligonucleotide Design

[0234] Synthetic oligonucleotide primers were designed on the basis of the coding sequence of each ORF, using (a) the meningococcus B sequence when available, or (b) the gonococcus/meningococcus A sequence, adapted to the codon preference usage of meningococcus. Any predicted signal peptides were omitted, by deducing the 5′-end amplification primer sequence immediately downstream from the predicted leader sequence.

[0235] For most ORFs, the 5′ primers included two restriction enzyme recognition sites (BamHI-NdeI, BamHI-NheI, or EcoRI-NheI, depending on the gene's restriction pattern); the 3′ primers included a XhoI restriction site. This procedure was established in order to direct the cloning of each amplification product (corresponding to each ORF) into two different expression systems: pGEX-KG (using either BamHI-XhoI or EcoRI-XhoI), and pET21b+ (using either NdeI-XhoI or NheI-XhoI).

| | | |
|---|---|---|
| 5′-end primer tail: | | |
| CGCGGATCCCATATG | (BamHI-NdeI) | SEQ ID NO: 108 |
| CGCGGATCCGCTAGC | (BamHI-NheI) | SEQ ID NO: 109 |
| CCGGAATTCTAGCTAGC | (EcoRI-NheI) | SEQ ID NO: 110 |
| 3′-end primer tail: | | |
| CCCGCTCGAG | (XhoI) | SEQ ID NO: 111 |

[0236] For some ORFs, two different amplifications were performed to clone each ORF in the two expression systems. Two different 5′ primers were used for each ORF; the same 3′ XhoI primer was used as before:

| | | |
|---|---|---|
| 5′-end primer tail: | | |
| GGAATTCCATATGGCCATGG | (NdeI) | SEQ ID NO: 112 |
| 5′-end primer tail: | | |
| CGGGATCC | (BamHI) | SEQ ID NO: 113 |

[0237] Other ORFs were cloned in the pTRC expression vector and expressed as an amino-terminus His-tag fusion. The predicted signal peptide may be included in the final product. NheI-BamHI restriction sites were incorporated using primers:

| | | |
|---|---|---|
| 5′-end primer tail: | | |
| GATCAGCTAGCCATATG | (NheI) | SEQ ID NO: 114 |
| 3′-end primer tail: | | |
| CGGGATCC | (BamHI) | SEQ ID NO: 115 |

[0238] As well as containing the restriction enzyme recognition sequences, the primers included nucleotides which hybridized to the sequence to be amplified. The number of hybridizing nucleotides depended on the melting temperature of the whole primer, and was determined for each primer using the formulae:
Tm=4(G+C)+2(A+T) (tail excluded)
Tm=64.9+0.41 (% GC)−600/N (whole primer)

[0239] The average melting temperature of the selected oligos were 65-70° C. for the whole oligo and 50-55° C. for the hybridising region alone.

[0240] Oligos were synthesized by a Perkin Elmer 394 DNA/RNA Synthesizer, eluted from the columns in 2 ml NH₄—OH, and deprotected by 5 hours incubation at 56° C. The oligos were precipitated by addition of 0.3M Na-Acetate and 2 volumes ethanol. The samples were then centrifuged and the pellets resuspended in either 100 μl or 1 ml of water. OD₂₆₀ was determined using a Perkin Elmer Lambda Bio spectophotometer and the concentration was determined and adjusted to 2-10 pmol/μl.

[0241] Table 1 shows the forward and reverse primers used for each amplification. In certain cases, it might be noted that the sequence of the primer does not exactly match the sequence in the ORF. When initial amplifications are performed, the complete 5′ and/or 3′ sequence may not be known for some meningococcal ORFs, although the corresponding sequences may have been identified in gonoccus. For amplification, the gonococcal sequences could thus be used as the basis for primer design, altered to take account of codon preference. In particular, the following codons may be changed: ATA→ATT; TCG→TCT; CAG→CAA; AAG→AAA; GAG→GAA; CGA and CGG→CGC; GGG→GGC.

Amplification

[0242] The standard PCR protocol was as follows: 50-200 ng of genomic DNA were used as a template in the presence of 20-40 μM of each oligo, 400-800 μM dNTPs solution, 1×PCR buffer (including 1.5 mM MgCl₂), 2.5 units TaqI DNA polymerase (using Perkin-Elmer AmpliTaQ, GIBCO Platinum, Pwo DNA polymerase, or Tahara Shuzo Taq polymerase).

[0243] In some cases, PCR was optimised by the addition of 10 μl DMSO or 50 μl 2M betaine.

[0244] After a hot start (adding the polymerase during a preliminary 3 minute incubation of the whole mix at 95° C.), each sample underwent a double-step amplification: the first 5 cycles were performed using as the hybridization temperature the one of the oligos excluding the restriction enzymes tail, followed by 30 cycles performed according to the hybridization temperature of the whole length oligos. The cycles were followed by a final 10 minute extension step at 72° C.

[0245] The standard cycles were as follows:

| | Denaturation | Hybridisation | Elongation |
|---|---|---|---|
| First 5 cycles | 30 seconds | 30 seconds | 30-60 seconds |
| | 95° C. | 50-55° C. | 72° C. |
| Last 30 cycles | 30 seconds | 30 seconds | 30-60 seconds |
| | 95° C. | 65-70° C. | 72° C. |

[0246] The elongation time varied according to the length of the ORF to be amplified.

[0247] The amplifications were performed using either a 9600 or a 2400 Perkin Elmer GeneAmp PCR System. To check the results, 1/10 of the amplification volume was loaded onto a 1-1.5% agarose gel and the size of each amplified fragment compared with a DNA molecular weight marker.

[0248] The amplified DNA was either loaded directly on a 1% agarose gel or first precipitated with ethanol and resuspended in a suitable volume to be loaded on a 1% agarose gel. The DNA fragment corresponding to the right size band was then eluted and purified from gel, using the Qiagen Gel Extraction Kit, following the instructions of the manufacturer. The final volume of the DNA fragment was 30 μl or 50 μl of either water or 10 mM Tris, pH 8.5.

Digestion of PCR Fragments

[0249] The purified DNA corresponding to the amplified fragment was split into 2 aliquots and double-digested with:

[0250] NdeI/AhoI or NheI/XhoI for cloning into pET-21b+ and further expression of the protein as a C-terminus His-tag fusion

[0251] BamHI/XhoI or EcoRI/AhoI for cloning into pGEX-KG and further expression of the protein as a GST N-terminus fusion.

[0252] For ORF 76, NheI/BamHI for cloning into pTRC-HisA vector and further expression of the protein as N-terminus His-tag fusion.

[0253] Each purified DNA fragment was incubated (37° C. for 3 hours to overnight) with 20 units of each restriction enzyme (New England Biolabs) in a either 30 or 40 μl final volume in the presence of the appropriate buffer. The digestion product was then purified using the QIAquick PCR purification kit, following the manufacturer's instructions, and eluted in a final volume of 30 (or 50) μl of either water or 10 mM Tris-HCl, pH 8.5. The final DNA concentration was determined by 1% agarose gel electrophoresis in the presence of titrated molecular weight marker.

Digestion of the Cloning Vectors (pET22B, pGEX-KG and pTRC-His A)

[0254] 10 μg plasmid was double-digested with 50 units of each restriction enzyme in 200 μl reaction volume in the presence of appropriate buffer by overnight incubation at 37° C. After loading the whole digestion on a 1% agarose gel, the band corresponding to the digested vector was purified from the gel using the Qiagen QIAquick Gel Extraction Kit and the DNA was eluted in 50 μl of 10 mM Tris-HCl, pH 8.5. The DNA concentration was evaluated by measuring OD₂₆₀ of the sample, and adjusted to 50 μg/μl. 1 μl of plasmid was used for each cloning procedure.

Cloning

[0255] The fragments corresponding to each ORF, previously digested and purified, were ligated in both pET22b and pGEX-KG. In a final volume of 20 μl, a molar ratio of 3:1 fragment/vector was ligated using 0.5 μl of NEB T4 DNA ligase (400 units/μl), in the presence of the buffer supplied by the manufacturer. The reaction was incubated at room temperature for 3 hours. In some experiments, ligation was performed using the Boheringer “Rapid Ligation Kit”, following the manufacturer's instructions.

[0256] In order to introduce the recombinant plasmid in a suitable strain, 100 μl E. coli DH5 competent cells were incubated with the ligase reaction solution for 40 minutes on ice, then at 37° C. for 3 minutes, then, after adding 800 μl LB broth, again at 37° C. for 20 minutes. The cells were then centrifuged at maximum speed in an Eppendorf microfuge and resuspended in approximately 200 μl of the supernatant. The suspension was then plated on LB ampicillin (100 mg/ml).

[0257] The screening of the recombinant clones was performed by growing 5 randomly-chosen colonies overnight at 37° C. in either 2 ml (PGEX or pTC clones) or 5 ml (pET clones) LB broth+100 μg/ml ampicillin. The cells were then pelletted and the DNA extracted using the Qiagen QIAprep Spin Miniprep Kit, following the manufacturer's instructions, to a final volume of 30 μl. 5 μl of each individual miniprep (approximately 1 g) were digested with either NdeI/XhoI or BamHI/XhoI and the whole digestion loaded onto a 1-1.5% agarose gel (depending on the expected insert size), in parallel with the molecular weight marker (1 Kb DNA Ladder, GIBCO). The screening of the positive clones was made on the base of the correct insert size.

Cloning

[0258] Certain ORFs may be cloned into the pGEX-HIS vector using EcoRI-PstI, EcoRI-SalI, or SalI-PstI cloning sites. After cloning, the recombinant plasmids may be introduced in the E. coli host W3110.

Expression

[0259] Each ORF cloned into the expression vector may then be transformed into the strain suitable for expression of the recombinant protein product. 1 μl of each construct was used to transform 30 μl of E. coli BL21 (pGEX vector), E. coli TOP 10 (pTRC vector) or E. coli BL21-DE3 (pET vector), as described above. In the case of the pGEX-His vector, the same E. coli strain (W3110) was used for initial cloning and expression. Single recombinant colonies were inoculated into 2 ml LB+Amp (100 μg/ml), incubated at 37° C. overnight, then diluted 1:30 in 20 ml of LB+Amp (100 μg/ml) in 100 ml flasks, making sure that the OD₆₀₀ ranged between 0.1 and 0.15. The flasks were incubated at 30° C. into gyratory water bath shakers until OD indicated exponential growth suitable for induction of expression (0.4-0.8 OD for pET and pTRC vectors; 0.8-1 OD for pGEX and pGEX-His vectors). For the pET, pTRC and pGEX-His vectors, the protein expression was induced by addiction of 1 mM IPTG, whereas in the case of pGEX system the final concentration of IPTG was 0.2 mM. After 3 hours incubation at 30° C., the final concentration of the sample was checked by OD. In order to check expression, 1 ml of each sample was removed, centrifuged in a microfuge, the pellet resuspended in PBS, and analysed by 12% SDS-PAGE with Coomassie Blue staining. The whole sample was centrifuged at 6000 g and the pellet resuspended in PBS for further use.

GST-Fusion Proteins Large-Scale Purification.

[0260] A single colony was grown overnight at 37° C. on LB+Amp agar plate. The bacteria were inoculated into 20 ml of LB+Amp liquid culture in a water bath shaker and grown overnight. Bacteria were diluted 1:30 into 600 ml of fresh medium and allowed to grow at the optimal temperature (20-37° C.) to OD₅₅₀ 0.8-1. Protein expression was induced with 0.2 mM IPTG followed by three hours incubation. The culture was centrifuged at 8000 rpm at 4° C. The supernatant was discarded and the bacterial pellet was resuspended in 7.5 ml cold PBS. The cells were disrupted by sonication on ice for 30 sec at 40 W using a Branson sonifier B-15, frozen and thawed two times and centrifuged again. The supernatant was collected and mixed with 150 μl Glutatione-Sepharose 4B resin (Pharmacia) (previously washed with PBS) and incubated at room temperature for 30 minutes. The sample was centrifuged at 700 g for 5 minutes at 4 C. The resin was washed twice with 10 ml cold PBS for 10 minutes, resuspended in 1 ml cold PBS, and loaded on a disposable column. The resin was washed twice with 2 ml cold PBS until the flow-through reached OD₂₈₀ of 0.02-0.06. The GST-fusion protein was eluted by addition of 700 μl cold Glutathione elution buffer 10 mM reduced glutathione, 50 mM Tris-HCl) and fractions collected until the OD₂₈₀ was 0.1. 21 μl of each fraction were loaded on a 12% SDS gel using either Biorad SDS-PAGE Molecular weight standard broad range (M1) (200, 116.25, 97.4, 66.2, 45, 31, 21.5, 14.4, 6.5 kDa) or Amersham Rainbow Marker (M″) (220, 66, 46, 30, 21.5, 14.3 kDa) as standards. As the MW of GST is 26 kDa, this value must be added to the MW of each GST-fusion protein.

His-Fusion Soluble Proteins Large-Scale Purification.

[0261] A single colony was grown overnight at 37° C. on a LB+Amp agar plate. The bacteria were inoculated into 20 ml of LB+Amp liquid culture and incubated overnight in a water bath shaker. Bacteria were diluted 1:30 into 600 ml fresh medium and allowed to grow at the optimal temperature (20-37° C.) to OD₅₅₀ 0.6-0.8. Protein expression was induced by addition of 1 mM IPTG and the culture further incubated for three hours. The culture was centrifuged at 8000 rpm at 4° C., the supernatant was discarded and the bacterial pellet was resuspended in 7.5 ml cold 10 mM imidazole buffer (300 mM NaCl, 50 mM phosphate buffer, 10 mM imidazole, pH 8). The cells were disrupted by sonication on ice for 30 sec at 40 W using a Branson sonifier B-15, frozen and thawed two times and centrifuged again. The supernatant was collected and mixed with 150 μl Ni²⁺-resin (Pharmacia) (previously washed with 10 mM imidazole buffer) and incubated at room temperature with gentle agitation for 30 minutes. The sample was centrifuged at 700 g for 5 minutes at 4° C. The resin was washed twice with 10 ml cold 10 mM imidazole buffer for 10 minutes, resuspended in 1 ml cold 10 mM imidazole buffer and loaded on a disposable column. The resin was washed at 4° C. with 2 ml cold 10 mM imidazole buffer until the flow-through reached the O.D₂₈₀ of 0.02-0.06. The resin was washed with 2 ml cold 20 mM imidazole buffer (300 mM NaCl, 50 mM phosphate buffer, 20 mM imidazole, pH 8) until the flow-through reached the O.D₂₈₀ of 0.02-0.06. The His-fusion protein was eluted by addition of 700 μl cold 250 mM imidazole buffer (300 mM NaCl, 50 mM phosphate buffer, 250 mM imidazole, pH 8) and fractions collected until the O.D₂₈₀ was 0.1. 21 μl of each fraction were loaded on a 12% SDS gel.

His-Fusion Insoluble Proteins Large-Scale Purification.

[0262] A single colony was grown overnight at 37° C. on a LB+Amp agar plate. The bacteria were inoculated into 20 ml of LB+Amp liquid culture in a water bath shaker and grown overnight. Bacteria were diluted 1:30 into 600 ml fresh medium and let to grow at the optimal temperature (37° C.) to O.D₅₅₀ 0.6-0.8. Protein expression was induced by addition of 1 mM IPTG and the culture further incubated for three hours. The culture was centrifuged at 8000 rpm at 4° C. The supernatant was discarded and the bacterial pellet was resuspended in 7.5 ml buffer B (urea 8M, 10 mM Tris-HCl, 100 mM phosphate buffer, pH 8.8). The cells were disrupted by sonication on ice for 30 sec at 40 W using a Branson sonifier B-15, frozen and thawed twice and centrifuged again. The supernatant was stored at −20° C., while the pellets were resuspended in 2 ml guanidine buffer (6M guanidine hydrochloride, 100 mM phosphate buffer, 10 mM Tris-HCl, pH 7.5) and treated in a homogenizer for 10 cycles. The product was centrifuged at 13000 rpm for 40 minutes. The supernatant was mixed with 150 μl Ni²⁺-resin (Pharmacia) (previously washed with buffer B) and incubated at room temperature with gentle agitation for 30 minutes. The sample was centrifuged at 700 g for 5 minutes at 4° C. The resin was washed twice with 10 ml buffer B for 10 minutes, resuspended in 1 ml buffer B, and loaded on a disposable column. The resin was washed at room temperature with 2 ml buffer B until the flow-through reached the OD₂₈₀ of 0.02-0.06. The resin was washed with 2 ml buffer C (urea 8M, 10 mM Tris-HCl, 100 mM phosphate buffer, pH 6.3) until the flow-through reached the O.D₂₈₀ of 0.02-0.06. The His-fusion protein was eluted by addition of 700 μl elution buffer (urea 8M, 10 mM Tris-HCl, 100 mM phosphate buffer, pH 4.5) and fractions collected until the OD₂₈₀ was 0.1. 21 μl of each fraction were loaded on a 12% SDS gel.

His-Fusion Proteins Renaturation

[0263] 10% glycerol was added to the denatured proteins. The proteins were then diluted to 20 μg/ml using dialysis buffer I (10% glycerol, 0.5M arginine, 50 mM phosphate buffer, 5 mM reduced glutathione, 0.5 mM oxidised glutathione, 2M urea, pH 8.8) and dialysed against the same buffer at 4° C. for 12-14 hours. The protein was further dialysed against dialysis buffer II (10% glycerol, 0.5M arginine, 50 mM phosphate buffer, 5 mM reduced glutathione, 0.5 mM oxidised glutathione, pH 8.8) for 12-14 hours at 4° C. Protein concentration was evaluated using the formula:
Protein (mg/ml)=(1.55×OD₂₈₀)−(0.76×OD₂₆₀)
Mice Immunisations

[0264] 20 μg of each purified protein were used to immunise mice intraperitoneally. In the case of some ORFs, Balb-C mice were immunised with Al(OH)₃ as adjuvant on days 1, 21 and 42, and immune response was monitored in samples taken on day 56. For other ORFs, CD1 mice could be immunised using the same protocol. For other ORFs, CD1 mice could be immunised using Freund's adjuvant, and the same immunisation protocol was used, except that the immune response was measured on day 42, rather than 56. Similarly, for still other ORFs, CD1 mice could be immunised with Freund's adjuvant, but the immune response was measured on day 49.

ELISA Assay (Sera Analysis)

[0265] The capsulated MenB M7 strain was plated on chocolate agar plates and incubated overnight at 37° C. Bacterial colonies were collected from the agar plates using a sterile dracon swab and inoculated into 7 ml of Mueller-Hinton Broth (Difco) containing 0.25% Glucose. Bacterial growth was monitored every 30 minutes by following OD₆₂₀. The bacteria were let to grow until the OD reached the value of 0.3-0.4. The culture was centrifuged for 10 minutes at 10000 rpm. The supernatant was discarded and bacteria were washed once with PBS, resuspended in PBS containing 0.025% formaldehyde, and incubated for 2 hours at room temperature and then overnight at 4° C. with stirring. 100 μl bacterial cells were added to each well of a 96 well Greiner plate and incubated overnight at 4° C. The wells were then washed three times with PBT washing buffer (0.1% Tween-20 in PBS). 200 μl of saturation buffer (2.7% Polyvinylpyrrolidone 10 in water) was added to each well and the plates incubated for 2 hours at 37° C. Wells were washed three times with PBT. 200 μl of diluted sera (Dilution buffer: 1% BSA, 0.1% Tween-20, 0.1% NaN₃ in PBS) were added to each well and the plates incubated for 90 minutes at 37° C. Wells were washed three times with PBT. 100 μl of HRP-conjugated rabbit anti-mouse (Dako) serum diluted 1:2000 in dilution buffer were added to each well and the plates were incubated for 90 minutes at 37° C. Wells were washed three times with PBT buffer. 100 μl of substrate buffer for HRP (25 ml of citrate buffer pH5, 10 mg of O-phenildiamine and 10 μl of H₂O) were added to each well and the plates were left at room temperature for 20 minutes. 100 μl H₂SO₄ was added to each well and OD₄₉₀ was followed. The ELISA was considered positive when OD490 was 2.5 times the respective pre-immune sera.

FACScan Bacteria Binding Assay Procedure.

[0266] The acapsulated MenB M7 strain was plated on chocolate agar plates and incubated overnight at 37° C. Bacterial colonies were collected from the agar plates using a sterile dracon swab and inoculated into 4 tubes containing 8 ml each Mueller-Hinton Broth (Difco) containing 0.25% glucose. Bacterial growth was monitored every 30 minutes by following OD₆₂₀. The bacteria were let to grow until the OD reached the value of 0.35-0.5. The culture was centrifuged for 10 minutes at 4000 rpm. The supernatant was discarded and the pellet was resuspended in blocking buffer (1% BSA, 0.4% NaN₃) and centrifuged for 5 minutes at 4000 rpm. Cells were resuspended in blocking buffer to reach OD₆₂₀ of 0.07. 100μl bacterial cells were added to each well of a Costar 96 well plate. 100 μl of diluted (1:200) sera (in blocking buffer) were added to each well and plates incubated for 2 hours at 4° C. Cells were centrifuged for 5 minutes at 4000 rpm, the supernatant aspirated and cells washed by addition of 200 μl/well of blocking buffer in each well. 100 μl of R-Phicoerytrin conjugated F(ab)₂ goat anti-mouse, diluted 1:100, was added to each well and plates incubated for 1 hour at 4° C. Cells were spun down by centrifugation at 400 rpm for 5 minutes and washed by addition of 200 μl/well of blocking buffer. The supernatant was aspirated and cells resuspended in 200 μl/well of PBS, 0.25% formaldehyde. Samples were transferred to FACScan tubes and read. The condition for FACScan setting were: FL1 on, FL2 and FL3 off; FSC-H Threshold: 92; FSC PMT Voltage: E 02; SSC PMT: 474; Amp. Gains 7.1; FL-2 PMT: 539. Compensation values: 0.

OMV Preparations

[0267] Bacteria were grown overnight on 5 GC plates, harvested with a loop and resuspended in 10 ml 20 mM Tris-HCl. Heat inactivation was performed at 56° C. for 30 minutes and the bacteria disrupted by sonication for 10′ on ice (50% duty cycle, 50% output). Unbroken cells were removed by centrifugation at 5000 g for 10 minutes and the total cell envelope fraction recovered by centrifugation at 50000 g at 4° C. for 75 minutes. To extract cytoplasmic membrane proteins from the crude outer membranes, the whole fraction was resuspended in 2% sarkosyl (Sigma) and incubated at room temperature for 20 minutes. The suspension was centrifuged at 10000 g for 10 minutes to remove aggregates, and the supernatant further ultracentrifuged at 50000 g for 75 minutes to pellet the outer membranes. The outer membranes were resuspended in 10 mM Tris-HCl, pH8 and the protein concentration measured by the Bio-Rad Protein assay, using BSA as a standard.

Whole Extracts Preparation

[0268] Bacteria were grown overnight on a GC plate, harvested with a loop and resuspended in 1 ml of 20 mM Tris-HCl. Heat inactivation was performed at 56° C. for 30′ minutes.

Western Blotting

[0269] Purified proteins (500 ng/lane), outer membrane vesicles (5 μg) and total cell extracts (25 μg) derived from MenB strain 2996 were loaded on 15% SDS-PAGE and transferred to a nitrocellulose membrane. The transfer was performed for 2 hours at 150 mA at 4° C., in transferring buffer (0.3% Tris base, 1.44% glycine, 20% methanol). The membrane was saturated by overnight incubation at 4° C. in saturation buffer (10% skimmed milk, 0.1% Triton X100 in PBS). The membrane was washed twice with washing buffer (3% skimmed milk, 0.1% Triton X100 in PBS) and incubated for 2 hours at 37° C. with 1:200 mice sera diluted in washing buffer. The membrane was washed twice and incubated for 90 minutes with a 1:2000 dilution of horseradish peroxidase labeled anti-mouse Ig. The membrane was washed twice with 0.1% Triton X100 in PBS and developed with the Opti-4CN Substrate Kit (Bio-Rad). The reaction was stopped by adding water.

Bactericidal Assay

[0270] MC58 strain was grown overnight at 37° C. on chocolate agar plates. 5-7 colonies were collected and used to inoculate 7 ml Mueller-Hinton broth. The suspension was incubated at 37° C. on a nutator and let to grow until OD₆₂₀ was in between 0.5-0.8. The culture was aliquoted into sterile 1.5 ml Eppendorf tubes and centrifuged for 20 minutes at maximum speed in a microfuge. The pellet was washed once in Gey's buffer (Gibco) and resuspended in the same buffer to an OD₆₂₀ of 0.5, diluted 1:20000 in Gey's buffer and stored at 25° C.

[0271] 50 μl of Gey's buffer/1% BSA was added to each well of a 96-well tissue culture plate. 25 μl of diluted (1:100) mice sera (dilution buffer: Gey's buffer/0.2% BSA) were added to each well and the plate incubated at 4° C. 25 μl of the previously described bacterial suspension were added to each well. 25 μl of either heat-inactivated (56° C. waterbath for 30 minutes) or normal baby rabbit complement were added to each well. Immediately after the addition of the baby rabbit complement, 22 μl of each sample/well were plated on Mueller-Hinton agar plates (time 0). The 96-well plate was incubated for 1 hour at 37° C. with rotation and then 22 μl of each sample/well were plated on Mueller-Hinton agar plates (time 1). After overnight incubation the colonies corresponding to time 0 and time 1 h were counted.

[0272] The following DNA and amino acid sequences are identified by titles of the following form: [g, m, or a][#].[seq or pep], where “g” means a sequence from N. gonorrhoeae, “m” means a sequence from N. meningitidis B, and “a” means a sequence from N. meningitidis A; “#” means the number of the sequence; “seq” means a DNA sequence, and “pep” means an amino acid sequence. For example, “g001.seq” refers to an N. gonorrohoeae DNA sequence, number 1. The presence of the suffix “-1” or “-2” to these sequences indicates an additional sequence found for the same ORF. Further, open reading frames are identified as ORF #, where “#” means the number of the ORF, corresponding to the number of the sequence which encodes the ORF, and the ORF designations may be suffixed with “.ng” or “.a”, indicating that the ORF corresponds to a N. gonorrhoeae sequence or a N. meningitidis A sequence, respectively. Computer analysis was performed for the comparisons that follow between “g”, “m”, and “a” peptide sequences; and therein the “pep” suffix is implied where not expressly stated.

### EXAMPLE 1

[0273] The following ORFs were predicted from the contig sequences and/or the full length sequences using the methods herein described.

Localization of the ORFs

[0274] ORF: contig:
[0275] 279 gnm4.seq

[0276] The following partial DNA sequence was identified in N. meningitidis <SEQ ID 2>:

| m279.seq | |
|---|---|
| 1 | ATAACGCGGA TTTGCGGCTG CTTGATTTCA ACGGTTTTCA GGGCTTCGGC |
| 51 | AAGTTTGTCG GCGGCGGGTT TCATCAGGCT GCAATGGGAA GGTACGGACA |
| 101 | CGGGCAGCGG CAGGGCGCGT TTGGCACCGG CTTCTTTGGC GGCAGCCATG |
| 151 | GCGCGTCCGA CGGCGGCGGC GTTGCCTGCA ATCACGATTT GTCCGGGTGA |
| 201 | GTTGAAGTTG ACGGCTTCGA CCACTTCGCT TTGGGCGGCT TCGGCACAAA |
| 251 | TGGCTTTAAC CTGCTCATCT TCCAAGCCGA GAATCGCCGC CATTGCGCCC |
| 301 | ACGCCTTGCG GTACGGCGGA CTGCATCAGT TCGGCGCGCA GGCGCACGAG |
| 351 | TTTGACCGCG TCGGCAAAAT TCAATGCGCC GGCGGCAACG AGTGCGGTGT |
| 401 | ATTCGCCGAG GCTGTGTCCG GCAACGGCGG CAGGCGTTTT GCCGCCCGCT |
| 451 | TCTAAATAG |

[0277] This corresponds to the amino acid sequence <SEQ ID 963; ORF 3>:

| m279.pep | |
|---|---|
| 1 | ITRICGCLIS TVFRASASLS AAGFIRLQWE GTDTGSGRAR LAPASLAAAM |
| 51 | ARPTAAALPA ITICPGELKL TASTTSLWAA SAQMALTCSS SKPRIAAIAP |
| 101 | TPCGTADCIS SARRRTSLTA SAKFNAPAAT SAVYSPRLCP ATAAGVLPPA |
| 151 | SK* |

[0278] The following partial DNA sequence was identified in N. gonorrhoeae <SEQ ID 4>:

| g279.seq | |
|---|---|
| 1 | atgacgcgga tttgcggctg cttgatttca acggttttga gtgtttcggc |
| 51 | aagtttgtcg gcggcgggtt tcatcaggct gcaatgggaa ggaacggata |
| 101 | ccggcagcgg cagggcgcgt ttggctccgg cttctttggc ggcagccatg |
| 151 | gtgcgtccga cggcggcggc gttgcctgca atcacgactt gtccgggcga |
| 201 | gttgaagttg acggcttcga ccacttcgcc ctgtgcggat tcggcacaaa |
| 251 | tctgcctgac ctgttcatct tccaaaccca aaatggccgc cattgcgcct |
| 301 | acgccttgcg gtacggcgga ctgcatcagt tcggcgcgca ggcggacgag |
| 351 | tttgacggca tcggcaaaat ccaatgcttc ggcggcgaca agcgcggtgt |
| 401 | attcgccgag gctgtgtccg gcaacggcgg caggcgtttt gccgcccact |
| 451 | tccaaatag |

[0279] This corresponds to the amino acid sequence <SEQ ID 5; ORF 279.ng>:

| g279.pep | |
|---|---|
| 1 | MTRICGCLIS TVLSVSASLS AAGFIRLQWE GTDTGSGRAR LAPASLAAAM |
| 51 | VRPTAAALPA ITTCPGELKL TASTTSPCAD SAQICLTCSS SKPKMAAIAP |
| 101 | TPCGTADCIS SARRRTSLTA SAKSNASAAT SAVYSPRLCP ATAAGVLPPT |
| 151 | SK* |

[0280] ORF 279 shows 89.5% identity over a 152 aa overlap with a predicted ORF (ORF 279.ng) from N. gonorrhoeae:

```
                  10 20 30 40 50 60
m279.pep
ITRICGCLISTVFRASASLSAAGFIRLQWEGTDTGSGRARLAPASLAAAMARPTAAALPA
:|||||||||||::||||||||||||||||||||||||||||||||||||:|||||||||
g279
MTRICGCLISTVLSVSASLSAAGFIRLQWEGTDTGSGRARLAPASLAAAMVRPTAAALPA
                        10 20 30 40 50 60
                        70 80 90 100 110 120
m279.pep
ITICPGELKLTASTTSLWAASAQMALTCSSSKPRIAAIAPTPCGTADCISSARRRTSLTA
            || ||||||||||||| | |||: ||||||||::|||||||||||||||||||||||||
g279
ITTCPGELKLTASTTSPCADSAQICLTCSSSKPKMAAIAPTPCGTADCISSARRRTSLTA
                        70 80 90 100 110 120
                  130 140 150
m279.pep SAKFNAPAATSAVYSPRLCPATAAGVLPPASKX
          ||| || ||||||||||||||||||||||:|||
g279 SAKSNASAATSAVYSPRLCPATAAGVLPPTSKX
                  130 140 150
```

[0281] The following partial DNA sequence was identified in N. meningitidis <SEQ ID 6>:

| a279.seq | |
|---|---|
| 1 | ATGACNCNGA TTTGCGGCTG CTTGATTTCA ACGGTTTNNA GGGCTTCGGC |
| 51 | GAGTTTGTCG GCGGCGGGTT TCATGAGGCT GCAATGGGAA GGTACNGACA |
| 101 | CNGGCAGCGG CAGGGCGCGT TTGGCGCCGG CTTCTTTGGC GGCAAGCATA |
| 151 | GCGCGCTCGA CGGCGGCGGC ATTGCCTGCA ATCACGACTT GTCCGGGCGA |
| 201 | GTTGAAGTTG ACGGCTTCAA CCACTTCATC CTGTGCGGAT TCGGCGCAAA |
| 251 | TTTGTTTTAC CTGTTCATCT TCCAAGCCGA GAATCGCCGC CATTGCGCCC |
| 301 | ACGCCTTGCG GTACGGCGGA CTGCATCAGT TCGGCGCGCA NGCGCACGAG |
| 351 | TTTGACCGCG TCGGCAAAAT CCAATGCGCC GGCGGCAACN AGTGCGGTGT |
| 401 | ATTCGCCGAN GCTGTGTCCG GCAACGGCGG CAGGCGTTTT GCCGCCCGCT |
| 451 | TCCGAATAG |

[0282] This corresponds to the amino acid sequence <SEQ ID 7; ORF 279.a>:

a279.pep

| | |
|---|---|
| 1 | MTXICGCLIS TVXRASASLS AAGFMRLQWE GTDTGSGRAR LAPASLAASI |
| 51 | ARSTAAALPA ITTCPGELKL TASTTSSCAD SAQICFTCSS SKPRIAAIAP |
| 101 | TPCGTADCIS SARXRTSLTA SAKSNAPAAT SAVYSPXLGP ATAAGVLPPA |
| 151 | SE* |

| m279/a279 | ORFs 279 and 279.a showed a 88.2% identity in 152 an overlap |
|---|---|
| | 10 20 30 40 50 60 |
| m279.pep | ITRICGCLISTVFRASASLSAAGFIRLQWEGTDTGSGRARLAPASLAAAMARPTAAALPA |
| :\| \|\|\|\|\|\|\|\|\| \|\|\|\|\|\|\|\|\|\|\|:\|\|\|\|\|\|\|\|\|\|\|\|\|\|\|\|\|\|\|\|\|\|\|::\|\| \|\|\|\|\|\|\| | |
| a279 | MTXICGCLISTVXRASASLSAAGFMRLQWEGTDTGSGRARLAPASLAASIARSTAAALPA |
| | 10 20 30 40 50 60 |
| | 70 80 90 100 110 120 |
| m279.pep | ITICPGELKLTASTTSLWAASAQMALTCSSSKPRIAAIAPTPCGTADCISSARRRTSLTA |

|| ||||||||||||| | |||: :||||||||||||||||||||||||||| ||||||

| | |
|---|---|
| a279 | ITTCPGELKLTASTTSSCADSAQICFTCSSSKPRIAAIAPTGCGTADCISSARXRTSLTA |
| | 70 80 90 100 110 120 |
| | 130 140 150 |
| m279.pep | SAKFNAPAATSAVYSPRLCPATAAGVLPPASKX |

||| |||||||||||| ||||||||||||||:|

| | |
|---|---|
| a279 | SAKSNAPAATSAVYSPXLCPATAAGVLPPASEX |
| | 130 140 150 |

519 and 519-1 gnm7.seq

[0283] The following partial DNA sequence was identified in N. meningitidis <SEQ ID 8>:

m519.seq (partial)

| | |
|---|---|
| 1 | TCCGTTATCG GGCGTATGGA GTTGGACAAA ACGTTTGAAG |
| | AACGCGACGA |
| 51 | AATCAACAGT ACTGTTGTTG CGGCTTTGGA CGAGGCGGCC |
| | GGGgCTTgGG |
| 101 | GTGTGAAGGT TTTGCGTTAT GAGATTAAAG ACTTGGTTCC |
| | GCCGCAAGAA |
| 151 | ATCCTTCGCT CAATGCAGGC GCAAATTACT GCCGAACGCG |
| | AAAAACGCGC |
| 201 | CCGTATCGCC GAATCCGAAG GTCGTAAAAT CGAACAAATC |
| | AACCTTGCCA |
| 251 | GTGGTCAGCG CGAAGCCGAA ATCCAACAAT CCGAAGGCGA |
| | GGCTCAGGCT |
| 301 | GCGGTCAATG CGTCAAATGC CGAGAAAATC GCCCGCATCA |
| | ACCGCGCCAA |
| 351 | AGGTGAAGCG GAATCCTTGC GCCTTGTTGC CGAAGCCAAT |
| | GCCGAAGCCA |
| 401 | TCCGTCAAAT TGCCGCCGCC CTTCAAACCC AAGGCGGTGC |
| | GGATGCGGTC |
| 451 | AATCTGAAGA TTGCGGAACA ATACGTCGCT GCGTTCAACA |
| | ATCTTGCCAA |
| 501 | AGAAAGCAAT ACGCTGATTA TGCCCGCCAA TGTTGCCGAC |
| | ATCGGCAGCC |
| 551 | TGATTTCTGC CGGTATGAAA ATTATCGACA GCAGCAAAAC |
| | CGCCAAaTAA |

[0284] This corresponds to the amino acid sequence <SEQ ID 9; ORF 519>:

m519.pep (partial)

| | |
|---|---|
| 1 | SVIGRMELDK TFEERDEINS TVVAALDEAA GAWGVKVLRY |
| | EIKDLVPPQE |
| 51 | ILRSMQAQIT AEREKRARIA ESEGRKIEQI NLASGQREAE |
| | IQQSEGEAQA |
| 101 | AVNASNAEKI ARINRAKGEA ESLRLVAEAN AEAIRQIAAA |
| | LQTQGGADAV |
| 151 | NLKIAEQYVA AFNNLAKESN TLIMPANVAD IGSLISAGMK |
| | IIDSSKTAK* |

[0285] The following partial DNA sequence was identified in N. gonorrhoeae <SEQ ID 10>:

g519.seq

| | |
|---|---|
| 1 | atggaatttt tcattatctt gttggcagcc gtcgccgttt |
| | tcggcttcaa |
| 51 | atcctttgtc gtcatccccc agcaggaagt ccacgttgtc |
| | gaaaggctcg |
| 101 | ggcgtttcca tcgcgccctg acggccggtt tgaatatttt |
| | gattcccttt |
| 151 | atcgaccgcg tcgcctaccg ccattcgctg aaagaaatcc |
| | ctttagacgt |
| 201 | acccagccag gtctgcatca cgcgcgataa tacgcaattg |
| | actgttgacg |
| 251 | gcatcatcta tttccaagta accgatccca aactcgcctc |
| | atacggttcg |
| 301 | agcaactaca ttatggcaat tacccagctt gcccaaacga |
| | cgctgcgttc |
| 351 | cgttatcggg cgtatggagt tggacaaaac gtttgaagaa |
| | cgcgacgaaa |
| 401 | tcaacagtac cgtcgtctcc gccctcgatg aagccgccgg |
| | ggcttggggt |
| 451 | gtgaaagtcc tccgttacga aatcaaggat ttggttccgc |
| | cgcaagaaat |
| 501 | ccttcgcgca atgcaggcac aaattaccgc cgaacgcgaa |
| | aaacgcgccc |
| 551 | gtattgccga atccgaaggc cgtaaaatcg aacaaatcaa |
| | ccttgccagt |
| 601 | ggtcagcgtg aagccgaaat ccaacaatcc gaaggcgagg |
| | ctcaggctgc |
| 651 | ggtcaatgcg tccaatgccg agaaaatcgc ccgcatcaac |
| | cgcgccaaag |
| 701 | gcgaagcgga atccctgcgc cttgttgccg aagccaatgc |
| | cgaagccaac |
| 751 | cgtcaaattg ccgccgccct tcaaacccaa agcggggcgg |
| | atgcggtcaa |
| 801 | tctgaagatt gcgggacaat acgttaccgc gttcaaaaat |
| | cttgccaaag |
| 851 | aagacaatac gcggattaag cccgccaagg ttgccgaaat |
| | cgggaaccct |
| 901 | aattttcggc ggcatgaaaa attttcgcca gaagcaaaaa |
| | cggccaaata |
| 951 | a |

[0286] This corresponds to the amino acid sequence <SEQ ID 11; ORF 519.ng>:

g519.pep

| | |
|---|---|
| 1 | MEFFIILLAA VAVFGFKSFV VIPQQEVHVV ERLGRFHRAL |
| | TAGLNILIPF |
| 51 | IDRVAYRHSL KEIPLDVPSQ VCITRDNTQL TVDGIIYFQV |
| | TDPKLASYGS |
| 101 | SNYIMAITQL AQTTLRSVIG RMELDKTFEE RDEINSTVVS |
| | ALDEAAGAWG |
| 151 | VKVLRYEIKD LVPPQEILRA MQAQITAERE KRARIAESEG |
| | RKIEQINLAS |
| 201 | GQREAEIQQS EGEAQAAVNA SNAEKIARIN RAKGEAESLR |
| | LVAEANAEAN |
| 251 | RQIAAALQTQ SGADAVNLKI AGQYVTAFKN LAKEDNTRIK |
| | PAKVAEIGNP |
| 301 | NFRRHEKFSP EAKTAK* |

[0287] ORF 519 shows 87.5% identity over a 200 aa overlap with a predicted ORF (ORF 519.ng) from N. gonorrhoeae:

| m519/g519 | |
|---|---|
| | 10 20 30 |
| m519.pep | SVIGRMELDKTFEERDEINSTVVAALDEAA |
| | \|\|\|\|\|\|\|\|\|\|\|\|\|\|\|\|\|\|\|\|\|\|\|\|:\|\|\|\|\|\| |
| g519 | YFQVTDPKLASYGSSNYIMAITQLAQTTLRSVIGRMELDKTFEERDEINSTVVSALDEAA |
| | 90 100 110 120 130 140 |
| | 40 50 60 70 80 90 |
| m519.pep | GAWGVKVLRYEIKDLVPPQEILRSMQAQITAEREKRARIAESEGRKIEQINLASGQREAE |
| | \|\|\|\|\|\|\|\|\|\|\|\|\|\|\|\|\|\|\|\|\|\|\|:\|\|\|\|\|\|\|\|\|\|\|\|\|\|\|\|\|\|\|\|\|\|\|\|\|\|\|\|\|\|\|\|\|\|\|\| |
| g519 | GAWGVKVLRYEIKDLVPPQEILRAMQAQITAEREKRARIAESEGRKIEQINLASGQREAE |
| | 150 160 170 180 190 200 |
| | 100 110 120 130 140 150 |
| m519.pep | IQQSEGEAQAAVNASNAEKIARINRAKGEAESLRLVAEANAEAIRQIAAALQTQGGADAV |
| | \|\|\|\|\|\|\|\|\|\|\|\|\|\|\|\|\|\|\|\|\|\|\|\|\|\|\|\|\|\|\|\|\|\|\|\|\|\|\|\|\|\|\| \|\|\|\|\|\|\|\|\|\|:\|\|\|\|\| |
| g519 | IQQSEGEAQAAVNASNAEKIARINRAKGEAESLRLVAEANAEANRQIAAALQTQSGADAV |
| | 210 220 230 240 250 260 |
| | 160 170 180 190 200 |
| m519.pep | NLKIAEQYVAAFNNLAKESNTLIMPANVADIGSL-ISAGMKIIDSSKTAK |
| | \|\|\|\|\| \|\|\|:\|\|:\|\|\|\|\|:\|\| \| \|\|:\|\|:\|\|: : \|: :\|\|\|\| |
| g519 | NLKIAGQYVTAFKNLAKEDNTRIKPAKVAEIGNPNFRRHEKFSPEAKTAK |
| | 270 280 290 300 310 |

[0288] The following partial DNA sequence was identified in N. meningitidis <SEQ ID 12>:

a519.seq

| | |
|---|---|
| 1 | ATGGAATTTT TCATTATCTT GCTGGCAGCC GTCGTTGTTT |
| | TCGGCTTCAA |
| 51 | ATCCTTTGTT GTCATCCCAC AGCAGGAAGT CCACGTTGTC |
| | GAAAGGCTCG |
| 101 | GGCGTTTCCA TCGCGCCCTG ACGGCCGGTT TGAATATTTT |
| | GATTCCCTTT |
| 151 | ATCGACCGCG TCGCCTACCG CCATTCGCTG AAAGAAATCC |
| | CTTTAGACGT |
| 201 | ACCCAGCCAG GTCTGCATCA CGCGCGACAA TACGCAGCTG |
| | ACTGTTGACG |
| 251 | GTATCATCTA TTTCCAAGTA ACCGACCCCA AACTCGCCTC |
| | ATACGGTTCG |
| 301 | AGCAACTACA TTATGGCGAT TACCCAGCTT GCCCAAACGA |
| | CGCTGCGTTC |
| 351 | CGTTATCGGG CGTATGGAAT TGGACAAAAC GTTTGAAGAA |
| | CGCGACGAAA |
| 401 | TCAACAGCAC CGTCGTCTCC GCCCTCGATG AAGCCGCCGG |
| | AGCTTGGGGT |
| 451 | GTGAAGGTTT TGCGTTATGA GATTAAAGAC TTGGTTCCGC |
| | CGCAAGAAAT |
| 501 | CCTTCGCTCA ATGCAGGCGC AAATTACTGC TGAACGCGAA |
| | AAACGCGCCC |
| 551 | GTATCGCCGA ATCCGAAGGT CGTAAAATCG AACAAATCAA |
| | CCTTGCCAGT |
| 601 | GGTCAGCGCG AAGCCGAAAT CCAACAATCC GAAGGCGAGG |
| | CTCAGGCTGC |
| 651 | GGTCAATGCG TCAAATGCCG AGAAAATCGC CCGCATCAAC |
| | CGCGCCAAAG |
| 701 | GTGAAGCGGA ATCCTTGCGC CTTGTTGCCG AAGCCAATGC |
| | CGAAGCCATC |
| 751 | CGTCAAATTG CCGCCGCCCT TCAAACCCAA GGCGGTGCGG |
| | ATGCGGTCAA |
| 801 | TCTGAAGATT GCGGAACAAT ACGTCGCCGC GTTCAACAAT |
| | CTTGCCAAAG |
| 851 | AAAGCAATAC GCTGATTATG CCCGCCAATG TTGCCGACAT |
| | CGGCAGCCTG |
| 901 | ATTTCTGCCG GTATGAAAAT TATCGACAGC AGCAAAACCG |
| | CCAAATAA |

[0289] This corresponds to the amino acid sequence <SEQ ID 13; ORF 519.a>:

| a519.pep | |
|---|---|
| 1 | MEFFIILLAA VVVFGFKSFV VIPQQEVHVV ERLGRFHRAL TAGLNILIPF |
| 51 | IDRVAYRHSL KEIPLDVPSQ VCITRDNTQL TVDGIIYFQV TDPKLASYGS |
| 101 | SNYIMAITQL AQTTLRSVIG RMELDKTFEE RDEINSTVVS ALDEAAGAWG |
| 151 | VKVLRYEIKD LVPPQEILRS MQAQITAERE KRARIAESEG RKIEQINLAS |
| 201 | GQREAEIQQS EGEAQAAVNA SNAEKIARIN RAKGEAESLR LVAEANAEAI |
| 251 | RQIAAALQTQ GGADAVNLKI AEQYVAAFNN LAKESNTLIM PANVADIGSL |
| 301 | ISAGMKIIDS SKTAK* |

| | |
|---|---|
| m519/a519 | ORFs 519 and 519.a showed a 99.5% identity in 199 an overlap |
| | 10 20 30 |
| m519.pep | SVIGRMELDKTFEERDEINSTVVSALDEAA |
| | \|\|\|\|\|\|\|\|\|\|\|\|\|\|\|\|\|\|\|\|\|\|\|\|:\|\|\|\|\|\| |
| a519 | YFQVTDPKLASYGSSNYIMAITQLAQTTLRSVIGRMELDKTFEERDEINSTVVSALDEAA |
| | 90 100 110 120 130 140 |
| | 40 50 60 70 80 90 |
| m519.pep | GAWGVKVLRYEIKDLVPPQEILRSMQAQITAEREKRARIAESEGRKIEQINLASGQREAE |
| | \|\|\|\|\|\|\|\|\|\|\|\|\|\|\|\|\|\|\|\|\|\|\|\|\|\|\|\|\|\|\|\|\|\|\|\|\|\|\|\|\|\|\|\|\|\|\|\|\|\|\|\|\|\|\|\|\|\|\|\| |
| a519 | GAWGVKVLRYEIKDLVPPQEILRSMQAQITAEREKRARIAESEGRKIEQINLASGQREAE |
| | 150 160 170 180 190 200 |
| | 100 110 120 130 140 150 |
| m519.pep | IQQSEGEAQAAVNASNAEKIARINRAKGEAESLRLVAEANAEAIRQIAAALQTQGGADAV |
| | \|\|\|\|\|\|\|\|\|\|\|\|\|\|\|\|\|\|\|\|\|\|\|\|\|\|\|\|\|\|\|\|\|\|\|\|\|\|\|\|\|\|\|\|\|\|\|\|\|\|\|\|\|\|\|\|\|\|\|\| |
| a519 | IQQSEGEAQAAVNASNAEKIARINRAKGEAESLRLVAEANAEAIRQIAAALQTQGGADAV |
| | 210 220 230 240 250 260 |
| | 160 170 180 190 200 |
| m519.pep | NLKIAEQYVAAFNNLAKESNTLIMPANVADIGSLISAGMKIIDSSKTAKX |
| | \|\|\|\|\|\|\|\|\|\|\|\|\|\|\|\|\|\|\|\|\|\|\|\|\|\|\|\|\|\|\|\|\|\|\|\|\|\|\|\|\|\|\|\|\|\|\|\|\|\| |
| a519 | NLKIAEQYVAAFNNLAKESNTLIMPANVADIQSLISAGMKIIDSSKTAKX |
| | 270 280 290 300 310 |

[0290] Further work revealed the following DNA sequence identified in N. meningitidis <SEQ ID 14>:

m519-1.seq

| | |
|---|---|
| 1 | ATGGAATTTT TCATTATCTT GTTGGTAGCC GTCGCCGTTT |
| | TCGGTTTCAA |
| 51 | ATCCTTTGTT GTCATCCCAC AACAGGAAGT CCACGTTGTC |
| | GAAAGGCTGG |
| 101 | GGCGTTTCCA TCGCGCCCTG ACGGcCGGTT TGAATATTTT |
| | GATTCCCTTT |
| 151 | ATCGACCGCG TCGCCTACCG CCATTCGCTG AAAGAAATCC |
| | CTTTAGACGT |
| 201 | ACCCAGCCAG GTCTGCATCA CGCGCGACAA TACGCAGCTG |
| | ACTGTTGACG |
| 251 | GCATCATCTA TTTCCAAGTA ACCGACCCCA AACTCGCCTC |
| | ATACGGTTCG |
| 301 | AGCAACTACA TTATGGCGAT TACCCAGCTT GCCCAAACGA |
| | CGCTGCGTTC |
| 351 | CGTTATCGGG CGTATGGAGT TGGACAAAAC GTTTGAAGAA |
| | CGCGACGAAA |
| 401 | TCAACAGTAC TGTTGTTGCG GCTTTGGACG AGGCGGCCGG |
| | GGCTTGGGGT |
| 451 | GTGAAGGTTT TGCGTTATGA GATTAAAGAC TTGGTTCCGC |
| | CGCAAGAAAT |
| 501 | CCTTCGCTCA ATGCAGGCGC AAATTACTGC CGAACGCGAA |
| | AAACGCGCCC |
| 551 | GTATCGCCGA ATCCGAAGGT CGTAAAATCG AACAAATCAA |
| | CCTTGCCAGT |
| 601 | GGTCAGCGCG AAGCCGAAAT CCAACAATCC GAAGGCGAGG |
| | CTCAGGCTGC |
| 651 | GGTCAATGCG TCAAATGCCG AGAAAATCGC CCGCATCAAC |
| | CGCGCCAAAG |
| 701 | GTGAAGCGGA ATCCTTGCGC CTTGTTGCCG AAGCCAATGC |
| | CGAAGCCATC |
| 751 | CGTCAAATTG CCGCCGCCCT TCAAACCCAA GGCGGTGCGG |
| | ATGCGGTCAA |
| 801 | TCTGAAGATT GCGGAACAAT ACGTCGCTGC GTTCAACAAT |
| | CTTGCCAAAG |
| 851 | AAAGCAATAC GCTGATTATG CCCGCCAATG TTGCCGACAT |
| | CGGCAGCCTG |
| 901 | ATTTCTGCCG GTATGAAAAT TATCGACAGC AGCAAAACCG |
| | CCAAATAA |

[0291] This corresponds to the amino acid sequence <SEQ ID 15; ORF 519-1>:

m519-1

| | |
|---|---|
| 1 | MEFFIILLVA VAVFGFKSFV VIPQQEVHVV ERLGRFHRAL |
| | TAGLNILIPF |
| 51 | IDRVAYRHSL KEIPLDVPSQ VCITRDNTQL TVDGIIYFQV |
| | TDPKLASYGS |
| 101 | SNYIMAITQL AQTTLRSVIG RMELDKTFEE RDEINSTVVA |
| | ALDEAAGAWG |
| 151 | VKVLRYEIKD LVPPQEILRS MQAQITAERE KRARIAESEG |
| | RKIEQINLAS |
| 201 | GQREAEIQQS EGEAQAAVNA SNAEKIARIN RAKGEAESLR |
| | LVAEANAEAI |
| 251 | RQIAAALQTQ GGADAVNLKI AEQYVAAFNN LAKESNTLIM |
| | PANVADIGSL |
| 301 | ISAGMKIIDS SKTAK* |

[0292] The following DNA sequence was identified in N. gonorrhoeae <SEQ ID 16>:

g519-1.seq

| | |
|---|---|
| 1 | ATGGAATTTT TCATTATCTT GTTGGCAGCC GTCGCCGTTT |
| | TCGGCTTCAA |
| 51 | ATCCTTTGTC GTCATCCCCC AGCAGGAAGT CCACGTTGTC |
| | GAAAGGCTCG |
| 101 | GGCGTTTCCA TCGCGCCCTG ACGGCCGGTT TGAATATTTT |
| | GATTCCCTTT |
| 151 | ATCGACCGCG TCGCCTACCG CCATTCGCTG AAAGAAATCC |
| | CTTTAGACGT |
| 201 | ACCCAGCCAG GTCTGCATCA CGCGCGATAA TACGCAATTG |
| | ACTGTTGACG |
| 251 | GCATCATCTA TTTCCAAGTA ACCGATCCCA AACTCGCCTC |
| | ATACGGTTCG |
| 301 | AGCAACTACA TTATGGCAAT TACCCAGCTT GCCCAAACGA |
| | CGCTGCGTTC |
| 351 | CGTTATCGGG CGTATGGAGT TGGACAAAAC GTTTGAAGAA |
| | CGCGACGAAA |
| 401 | TCAACAGTAC CGTCGTCTCC GCCCTCGATG AAGCCGCCGG |
| | GGCTTGGGGT |
| 451 | GTGAAAGTCC TCCGTTACGA AATCAAGGAT TTGGTTCCGC |
| | CGCAAGAAAT |
| 501 | CCTTCGCGCA ATGCAGGCAC AAATTACCGC CGAACGCGAA |
| | AAACGCGCCC |
| 551 | GTATTGCCGA ATCCGAAGGC CGTAAAATCG AACAAATCAA |
| | CCTTGCCAGT |
| 601 | GGTCAGCGTG AAGCCGAAAT CCAACAATCC GAAGGCGAGG |
| | CTCAGGCTGC |
| 651 | GGTCAATGCG TCCAATGCCG AGAAAATCGC CCGCATCAAC |
| | CGCGCCAAAG |
| 701 | GCGAAGCGGA ATCCCTGCGC CTTGTTGCCG AAGCCAATGC |
| | CGAAGCCATC |
| 751 | CGTCAAATTG CCGCCGCCCT TCAAACCCAA GGCGGGGCGG |
| | ATGCGGTCAA |
| 801 | TCTGAAGATT GCGGAACAAT ACGTAGCCGC GTTCAACAAT |
| | CTTGCCAAAG |
| 851 | AAAGCAATAC GCTGATTATG CCCGCCAATG TTGCCGACAT |
| | CGGCAGCCTG |
| 901 | ATTTCTGCCG GCATGAAAAT TATCGACAGC AGCAAAACCG |
| | CCAAATAA |

[0293] This corresponds to the amino acid sequence <SEQ ID 17; ORF 519-1.ng>:

| g519-1.pep | |
|---|---|
| 1 | MEFFIILLAA VAVFGFKSFV VIPQQEVHVV ERLGRFHRAL TAGLNILIPF |
| 51 | IDRVAYRHSL KEIPLDVPSQ VCITRDNTQL TVDGIIYFQV TDPKLASYGS |
| 101 | SNYIMAITQL AQTTLRSVIG RMELDKTFEE RDEINSTVVS ALDEAAGAWG |
| 151 | VKVLRYEIKD LVPPQEILRA MQAQITAERE KRARIAESEG RKIEQINLAS |
| 201 | GQREAEIQQS EGEAQAAVNA SNAEKIARIN RAKGEAESLR LVAEANAEAI |
| 251 | RQIAAALQTQ GGADAVNLKI AEQYVAAFNN LAKESNTLIM PANVADIGSL |
| 301 | ISAGMKIIDS SKTAK* |

| | |
|---|---|
| m519-1/g519-1 | ORFs 519-1 and 519-1.ng showed a 99.0% identity in 315 aa overlap |
| | 10 20 30 40 50 60 |
| g519-1.pep | MEFFIILLAAVAVFGFKSFVVIPQQEVHVVERLGRFHRALTAGLNILIPFIDRVAYRHSL |
| | \|\|\|\|\|\|\|\|:\|\|\|\|\|\|\|\|\|\|\|\|\|\|\|\|\|\|\|\|\|\|\|\|\|\|\|\|\|\|\|\|\|\|\|\|\|\|\|\|\|\|\|\|\|\|\|\|\|\|\| |
| m519-1 | MEFFIILLVAVAVFGFKSFVVIPQQEVHVVERLGRFHRALTAGLNILIPFIDRVAYRHSL |
| | 10 20 30 40 50 60 |
| | 70 80 90 100 110 120 |
| g519-1.pep | KEIPLDVPSQVCITRDNTQLTVDGIIYFQVTDPKLASYGSSNYIMAITQLAQTTLRSVIG |
| | \|\|\|\|\|\|\|\|\|\|\|\|\|\|\|\|\|\|\|\|\|\|\|\|\|\|\|\|\|\|\|\|\|\|\|\|\|\|\|\|\|\|\|\|\|\|\|\|\|\|\|\|\|\|\|\|\|\|\|\| |
| m519-1 | KEIPLDVPSQVCITRDNTQLTVDGIIYFQVTDPKLASYGSSNYIMAITQLAQTTLRSVIG |
| | 70 80 90 100 110 120 |
| | 130 140 150 160 170 180 |
| g519-1.pep | RMELDKTFEERDEINSTVVSALDEAAGAWGVKVLRYEIKDLVPPQEILRAMQAQITERE |
| | \|\|\|\|\|\|\|\|\|\|\|\|\|\|\|\|\|\|\|:\|\|\|\|\|\|\|\|\|\|\|\|\|\|\|\|\|\|\|\|\|\|\|\|\|\|\|\|\|:\|\|\|\|\|\|\|\|\|\| |
| m519-1 | RMELDKTFEERDEINSTVVALDEAAGAWGVKVLRYEIKDLVPPQEILRSMQAQITAERE |
| | 130 140 150 160 170 180 |
| | 190 200 210 220 230 240 |
| g519-1.pep | KRARIAESEGRKIEQINLASGQREAEIQQSEGEAQAAVNASNAEKIARINRAKGEAESLR |
| | \|\|\|\|\|\|\|\|\|\|\|\|\|\|\|\|\|\|\|\|\|\|\|\|\|\|\|\|\|\|\|\|\|\|\|\|\|\|\|\|\|\|\|\|\|\|\|\|\|\|\|\|\|\|\|\|\|\|\|\| |
| m519-1 | KRARIAESEGRKIEQINLASGQREAEIQQSEGEAQAAVNASNAEKIARINRAKGEAESLR |
| | 190 200 210 220 230 240 |
| | 250 260 270 280 290 300 |
| g519-1.pep | LVAEANAEAIRQIAAALQTQGGADAVNLKIAEQYVAAFNNLAKESNTLIMPANVADIGSL |
| | \|\|\|\|\|\|\|\|\|\|\|\|\|\|\|\|\|\|\|\|\|\|\|\|\|\|\|\|\|\|\|\|\|\|\|\|\|\|\|\|\|\|\|\|\|\|\|\|\|\|\|\|\|\|\|\|\|\|\|\| |
| m519-1 | LVAEANAEAIRQIAAALQTQGGADAVNLKIAEQYVAAFNNLAKESNTLIMPANVADIGSL |
| | 250 260 270 280 290 300 |
| | 310 |
| g519-1.pep | ISAGMKIIDSSKTAKX |
| | \|\|\|\|\|\|\|\|\|\|\|\|\|\|\|\| |
| m519-1 | ISAGMKIIDSSKTAKX |
| | 310 |

[0294] The following DNA sequence was identified in N. meningitidis <SEQ ID 18>:

a519-1.seq

| | |
|---|---|
| 1 | ATGGAATTTT TCATTATCTT GCTGGCAGCC GTCGTTGTTT |
| | TCGGCTTCAA |
| 51 | ATCCTTTGTT GTCATCCCAC AGCAGGAAGT CCACGTTGTC |
| | GAAAGGCTCG |
| 101 | GGCGTTTCCA TCGCGCCCTG ACGGCCGGTT TGAATATTTT |
| | GATTCCCTTT |
| 151 | ATCGACCGCG TCGCCTACCG CCATTCGCTG AAAGAAATCC |
| | CTTTAGACGT |
| 201 | ACCCAGCCAG GTCTGCATCA CGCGCGACAA TACGCAGCTG |
| | ACTGTTGACG |
| 251 | GTATCATCTA TTTCCAAGTA ACCGACCCCA AACTCGCCTC |
| | ATACGGTTCG |
| 301 | AGCAACTACA TTATGGCGAT TACCCAGCTT GCCCAAACGA |
| | CGCTGCGTTC |
| 351 | CGTTATCGGG CGTATGGAAT TGGACAAAAC GTTTGAAGAA |
| | CGCGACGAAA |
| 401 | TCAACAGCAC CGTCGTCTCC GCCCTCGATG AAGCCGCCGG |
| | AGCTTGGGGT |
| 451 | GTGAAGGTTT TGCGTTATGA GATTAAAGAC TTGGTTCCGC |
| | CGCAAGAAAT |
| 501 | CCTTCGCTCA ATGCAGGCGC AAATTACTGC TGAACGCGAA |
| | AAACGCGCCC |
| 551 | GTATCGCCGA ATCCGAAGGT CGTAAAATCG AACAAATCAA |
| | CCTTGCCAGT |
| 601 | GGTCAGCGCG AAGCCGAAAT CCAACAATCC GAAGGCGAGG |
| | CTCAGGCTGC |
| 651 | GGTCAATGCG TCAAATGCCG AGAAAATCGC CCGCATCAAC |
| | CGCGCCAAAG |
| 701 | GTGAAGCGGA ATCCTTGCGC CTTGTTGCCG AAGCCAATGC |
| | CGAAGCCATC |
| 751 | CGTCAAATTG CCGCCGCCCT TCAAACCCAA GGCGGTGCGG |
| | ATGCGGTCAA |
| 801 | TCTGAAGATT GCGGAACAAT ACGTCGCCGC GTTCAACAAT |
| | CTTGCCAAAG |
| 851 | AAAGCAATAC GCTGATTATG CCCGCCAATG TTGCCGACAT |
| | CGGCAGCCTG |
| 901 | ATTTCTGCCG GTATGAAAAT TATCGACAGC AGCAAAACCG |
| | CCAAATAA |

[0295] This corresponds to the amino acid sequence <SEQ ID 19; ORF 519-1.a>:

| a519-1.pep | |
|---|---|
| 1 | MEFFIILLAA VVVFGFKSFV VIPQQEVHVV ERLGRFHRAL TAGLNILIPF |
| 51 | IDRVAYRHSL KEIPLDVPSQ VCITRDNTQL TVDGIIYFQV TDPKLASYGS |
| 101 | SNYIMAITQL AQTTLRSVIG RMELDKTFEE RDEINSTVVS ALDEAAGAWG |
| 151 | VKVLRYEIKD LVPPQEILRS MQAQITAERE KRARIAESEG RKIEQINLAS |
| 201 | GQREAEIQQS EGEAQAAVNA SNAEKIARIN RAKGEAESLR LVAEANAEAI |
| 251 | RQIAAALQTQ GGADAVNLKI AEQYVAAFNN LKAESNTLIM PANVADIGSL |
| 301 | ISAGMKIIDS SKTAK* |
| m519-1/a519-1 | ORFs 519-1 and 519-1.a showed a 99.0% identity in 315 an overlap |
| | 10 20 30 40 50 60 |
| a519-1.pep | MEFFIILLAAVVVFGFKSFVVIPQQEVHVVERIGREHRALTAGLNILIPFIDRVAYRHSL |
| | \|\|\|\|\|\|\|\|:\|\|:\|\|\|\|\|\|\|\|\|\|\|\|\|\|\|\|\|\|\|\|\|\|\|\|\|\|\|\|\|\|\|\|\|\|\|\|\|\|\|\|\|\|\|\|\|\|\|\| |
| m519-1 | MEFFIILLVAVAVFGFKSFVVIPQQEVHVVERIGRFHRALTAGLNILIPFIDRVAYRHSL |
| | 10 20 30 40 50 60 |
| | 70 80 90 100 110 120 |
| a519-1.pep | KEIPLDVPSQVCITRDNTQLTVDGIIYFQVTDPKLASYGSSNYIMMTQLAQTTLRSVIG |
| | \|\|\|\|\|\|\|\|\|\|\|\|\|\|\|\|\|\|\|\|\|\|\|\|\|\|\|\|\|\|\|\|\|\|\|\|\|\|\|\|\|\|\|\|\|\|\|\|\|\|\|\|\|\|\| |
| m519-1 | KEIPLDVPSQVCITRDNTQLTVDGIIYFQVTDPKLASYGSSNYIMMTQLAQTTLRSVIG |
| | 70 80 90 100 110 120 |
| | 130 140 150 160 170 180 |
| a519-1.pep | RMELDKTFEERDEINSTVVSALDEAAGAWGVKVLRYEIKDLVPPQEILRSMQAQITAERE |
| | \|\|\|\|\|\|\|\|\|\|\|\|\|\|\|\|\|\|\|:\|\|\|\|\|\|\|\|\|\|\|\|\|\|\|\|\|\|\|\|\|\|\|\|\|\|\|\|\|\|\|\|\|\|\|\|\|\|\|\| |
| m519-1 | RMELDKTFEERDEINSTVVAALDEAAGAWGVKVLRYEIKDLVPPQEILRSMQAQITAERE |
| | 130 140 150 160 170 180 |
| | 190 200 210 220 230 240 |
| a519-1.pep | KRARIAESEGRKIEQINLASGQREAEIQQSEGEAQAAVNASNAEKIARINRAKGEAESLR |
| | \|\|\|\|\|\|\|\|\|\|\|\|\|\|\|\|\|\|\|\|\|\|\|\|\|\|\|\|\|\|\|\|\|\|\|\|\|\|\|\|\|\|\|\|\|\|\|\|\|\|\|\|\|\|\| |
| m519-1 | KRARIAESEGRKIEQINLASGQREAEIQQSEGEAQAAVNASNAEKIARINRAKGEAESLR |
| | 190 200 210 220 230 240 |
| | 250 260 270 280 290 300 |
| a519-1.pep | LVAEANAEAIRQIAAALQTQGGADAVNLKIAEQYVAAFNNLAKESNTLIMPANVADIGSL |
| | \|\|\|\|\|\|\|\|\|\|\|\|\|\|\|\|\|\|\|\|\|\|\|\|\|\|\|\|\|\|\|\|\|\|\|\|\|\|\|\|\|\|\|\|\|\|\|\|\|\|\|\|\|\|\| |
| m519-1 | LVAEANAEAIRQIAAALQTQGGADAVNLKIAEQYVAAFNNLAKESNTLIMPANVADIGSL |
| | 250 260 270 280 290 300 |
| | 310 |
| a519-1.pep | ISAGMKIIDSSKTAKX |
| | \|\|\|\|\|\|\|\|\|\|\|\|\|\|\|\| |
| m519-1 | ISAGMKIIDSSKTAKX |
| | 310 |

576 and 576-1 gnm22.seq

[0296] The following partial DNA sequence was identified in N. meningitidis <SEQ ID 20>:

m576.seq (partial)

| | |
|---|---|
| 1 | ATGCAGCAGG CAAGCTATGC GATGGGCGTG GACATCGGAC |
| | GCTCCCTGAA |
| 51 | GCAAATGAAG GAACAGGGCG CGGAAATCGA TTTGAAAGTC |
| | TTTACCGAAG |
| 101 | CCATGCAGGC AGTGTATGAC GGCAAAGAAA TCAAAATGAC |
| | CGAAGAGCAG |
| 151 | GCTCAGGAAG TGATGATGAA ATTCCTTCAG GAACAACAGG |
| | CTAAAGCCGT |
| 201 | AGAAAAACAC AAGGCGGACG CGAAGGCCAA TAAAGAAAAA |
| | GGCGAAGCCT |
| 251 | TTCTGAAAGA AAATGCCGCC AAAGACGGCG TGAAGACCAC |
| | TGCTTCCGGC |
| 301 | CTGCAATACA AAATCACCAA ACAGGGCGAA GGCAAACAGC |
| | CGACCAAAGA |
| 351 | CGACATCGTT ACCGTGGAAT ACGAAGGCCG CCTGATTGAC |
| | GGTACGGTAT |
| 401 | TCGACAGCAG CAAAGCCAAC GGCGGCCCGG TCACCTTCCC |
| | TTTGAGCCAA |
| 451 | GTGATTCCGG GTTGGACCGA AGgCGTACAG CTTCTGAAAG |
| | AAGGCGGCGA |
| 501 | AGCCACGTTC TACATCCCGT CCAACCTTGC CTACCGCGAA |
| | CAGGGTGCGG |
| 551 | GCGACAAAAT CGGTCCGAAC GCCACTTTGG TATTTGATGT |
| | GAAACTGGTC |
| 601 | AAAATCGGCG CACCCGAAAA CGCGCCCGCC AAGCAGCCGG |
| | CTCAAGTCGA |
| 651 | CATCAAAAAA GTAAATTAA |

[0297] This corresponds to the amino acid sequence <SEQ ID 21; ORF 576>:

m576.pep (partial)

| | |
|---|---|
| 1 | MQQASYAMGV DIGRSLKQMK EQGAEIDLKV FTEAMQAVYD |
| | GKEIKMTEEQ |
| 51 | AQEVMMKFLQ EQQAKAVEKH KADAKANKEK GEAFLKENAA |
| | KDGVKTTASG |
| 101 | LQYKITKQGE GKQPTKDDIV TVEYEGRLID GTVFDSSKAN |
| | GGPVTFPLSQ |
| 151 | VIPGWTEGVQ LLKEGGEATF YIPSNLAYRE QGAGDKIGPN |
| | ATLVFDVKLV |
| 201 | KIGAPENAPA KQPAQVDIKK VN* |

[0298] The following partial DNA sequence was identified in N. gonorrhoeae <SEQ ID 22>:

g576.seq (partial)

| | |
|---|---|
| 1 | atgggcgtgg acatcggacg ctccctgaaa caaatgaagg |
| | aacagggcgc |
| 51 | ggaaatcgat ttgaaagtct ttaccgatgc catgcaggca |
| | gtgtatgacg |
| 101 | gcaaagaaat caaaatgacc gaagagcagg cccaggaagt |
| | gatgatgaaa |
| 151 | ttcctgcagg agcagcaggc taaagccgta gaaaaacaca |
| | aggcggatgc |
| 201 | gaaggccaac aaagaaaaag gcgaagcctt cctgaaggaa |
| | aatgccgccg |
| 251 | aagacggcgt gaagaccact gcttccggtc tgcagtacaa |
| | aatcaccaaa |
| 301 | cagggtgaag gcaaacagcc gacaaaagac gacatcgtta |
| | ccgtggaata |
| 351 | cgaaggccgc ctgattgacg gtaccgtatt cgacagcagc |
| | aaagccaacg |
| 401 | gcggcccggc caccttccct ttgagccaag tgattccggg |
| | ttggaccgaa |
| 451 | ggcgtacggc ttctgaaaga aggcggcgaa gccacgttct |
| | acatcccgtc |
| 501 | caaccttgcc taccgcgaac agggtgcggg cgaaaaaatc |
| | ggtccgaacg |
| 551 | ccactttggt atttgacgtg aaactggtca aaatcggcgc |
| | acccgaaaac |
| 601 | gcgcccgcca agcagccgga tcaagtcgac atcaaaaaag |
| | taaattaa |

[0299] This corresponds to the amino acid sequence <SEQ ID 23; ORF 576.ng>:

g576.pep (partial)

| | |
|---|---|
| 1 | MGVDIGRSLK QMKEQGAEID LKVFTDAMQA VYDGKEIKMT |
| | EEQAQEVMMK |
| 51 | FLQEQQAKAV EKHKADAKAN KEKGEAFLKE NAAEDGVKTT |
| | ASGLQYKITK |
| 101 | QGEGKQPTKD DIVTVEYEGR LIDGTVFDSS KANGGPATFP |
| | LSQVIPGWTE |
| 151 | GVRLLKEGGE ATFYIPSNLA YREQGAGEKI GPNATLVFDV |
| | KLVKIGAPEN |
| 201 | APAKQPDQVD IKKVN* |

Computer analysis of this amino acid sequence gave the following results:

[0300] Homology with a Predicted ORF from N. gonorrhoeae

| m576/g576 | 97.2% identity in 215 aa overlap |
|---|---|
| | 10 20 30 40 50 60 |
| m576.pep | MQQASYAMGVDIGRSLKQMKEQGAEIDLKVFTEAMQAVYDGKEIKMTEEQAQEVMMKFLQ |
| | \|\|\|\|\|\|\|\|\|\|\|\|\|\|\|\|\|\|\|\|\|\|\|\|\|:\|\|\|\|\|\|\|\|\|\|\|\|\|\|\|\|\|\|\|\|\|\|\|\|\|\|\|\|\|\|\|\|\|\| |
| g576 | MGVDIGRSLKQMKEQGAEIDLKVFTDAMQAVYDGKEIKMTEEQAQEVMMKFLQ |
| | 10 20 30 40 50 |
| | 70 80 90 100 110 120 |
| m576.pep | EQQAKAVEKHKADAKANKEKGEAFLKENAAKDGVKTTASGLQYKITKQGEGKQPTKDDIV |
| | \|\|\|\|\|\|\|\|\|\|\|\|\|\|\|\|\|\|\|\|\|\|\|\|\|\|\|\|\|\|:\|\|\|\|\|\|\|\|\|\|\|\|\|\|\|\|\|\|\|\|\|\|\|\|\|\|\|\|\| |
| g576 | EQQAKAVEKHKADAKANKEKGEAFLKENAAEDGVKTTASGLQYKITKQGEGKQPTKDDIV |
| | 60 70 80 90 100 110 |
| | 130 140 150 160 170 180 |
| m576.pep | TVEYEGRLIDGTVFDSSKANGGPVTFPLSQVIPGWTEGVQLLKEGGEATFYIPSNLAYRE |
| | \|\|\|\|\|\|\|\|\|\|\|\|\|\|\|\|\|\|\|\|\|\|\|:\|\|\|\|\|\|\|\|\|\|\|\|\|\|\|:\|\|\|\|\|\|\|\|\|\|\|\|\|\|\|\|\|\|\|\| |
| g576 | TVEYEGRLIDGTVFDSSKANGGPATFPLSQVIPGWTEGVRLLKEGGEATFYIPSNLAYRE |
| | 120 130 140 150 160 170 |
| | 190 200 210 220 |
| m576.pep | QGAGDKIGPNATLVFDVKLVKIGAPENAPAKQPAQVDIKKVNIX |
| | \|\|\|:\|\|\|\|\|\|\|\|\|\|\|\|\|\|\|\|\|\|\|\| \|\|\|\|\|\|\|\|\|\|\|\|\|\|\|\|\|\|\| |
| g576 | QGAGEKIGPNATLVFDVKLVKIGAPENAPAKQPDQVDIKKVNIX |
| | 180 190 200 210 |

[0301] The following partial DNA sequence was identified in N. meningitidis <SEQ ID 24>:

a576.seq

| | |
|---|---|
| 1 | ATGAACACCA TTTTCAAAAT CAGCGCACTG ACCCTTTCCG |
| | CCGCTTTGGC |
| 51 | ACTTTCCGCC TGCGGCAAAA AAGAAGCCGC CCCCGCATCT |
| | GCATCCGAAC |
| 101 | CTGCCGCCGC TTCTTCCGCG CAGGGCGACA CCTCTTCGAT |
| | CGGCAGCACG |
| 151 | ATGCAGCAGG CAAGCTATGC GATGGGCGTG GACATCGGAC |
| | GCTCCCTGAA |
| 201 | GCAAATGAAG GAACAGGGCG CGGAAATCGA TTTGAAAGTC |
| | TTTACCGAAG |
| 251 | CCATGCAGGC AGTGTATGAC GGCAAAGAAA TCAAAATGAC |
| | CGAAGAGCAG |
| 301 | GCTCAGGAAG TCATGATGAA ATTCCTTCAG GAACAACAGG |
| | CTAAAGGCGT |
| 351 | AGAAAAACAC AAGGCGGACG CGAAGGCCAA TAAAGAAAAA |
| | GGCGAAGCCT |
| 401 | TTCTGAAAGA AAATGCCGCC AAAGACGGCG TGAAGACCAC |
| | TGCTTCCGGC |
| 451 | CTGCAATACA AAATCACCAA ACAGGGCGAA GGCAAACAGC |
| | CGACCAAAGA |
| 501 | CGACATCGTT ACCGTGGAAT ACGAAGGCCG CCTGATTGAC |
| | GGTACGGTAT |
| 551 | TCGACAGCAG CAAAGCCAAC GGCGGCCCGG TCACCTTGCC |
| | TTTGAGCCAA |
| 601 | GTGATTCTGG GTTGGACCGA AGGCGTACAG CTTCTGAAAG |
| | AAGGCGGCGA |
| 651 | AGCCACGTTC TACATCCCGT CCAACCTTGC CTACCGCGAA |
| | CAGGGTGCGG |
| 701 | GCGACAAAAT CGGCCCGAAC GCCACTTTGG TATTTGATGT |
| | GAAACTGGTC |
| 751 | AAAATCGGCG CACCCGAAAA CGCGCCCGCC AAGCAGCCGG |
| | CTCAAGTCGA |
| 801 | CATCAAAAAA GTAAATTAA |

[0302] This corresponds to the amino acid sequence <SEQ ID 25; ORF 576.a>:

| a576.pep | |
|---|---|
| 1 | MNTIFKISAL TLSAALALSA CGKKEAAPAS ASEPAAASSA QGDTSSIGST |
| 51 | MQQASYAMGV DIGRSLKQMK EQGAEIDLKV FTEAMQAVYD GKEIKMTEEQ |
| 101 | AQEVMMKFLQ EQQAKAVEKH KADAKANKEK GEAFLKENAA KDGVKTTASG |
| 151 | LQYKITKQGE GKQPTKDDIV TVEYEGRLID GTVFDSSKAN GGPVTFPLSQ |
| 201 | VILGWTEGVQ LLKEGGEATF YIPSNLAYRE QGAGKDIGPN ATLVFDVKLV |
| 251 | KIGAPENAPA KQPAYVDIKK VN* |

| | |
|---|---|
| m576/a576 | ORFs 576 and 576.a showed a 99.5% identity in 222 an overlap |
| | 10 20 30 |
| m576.pep | MQQASYAMGVDIGRSLKQMKEQGAEIDLKV |
| | \|\|\|\|\|\|\|\|\|\|\|\|\|\|\|\|\|\|\|\|\|\|\|\|\|\|\|\|\|\| |
| a576 | CGKKEAAPASASEPAAASSAQGDTSSIGSTMQQASYAMGVDIGRSLKQMKEQGAEIDLKV |
| | 30 40 50 60 70 80 |
| | 40 50 60 70 80 90 |
| m576.pep | FTEAMQAVYDGKEIKMTEEQAQEVMMKFLQEQQAKAVEKHKADAKANKEKGEAFLKENAA |
| | \|\|\|\|\|\|\|\|\|\|\|\|\|\|\|\|\|\|\|\|\|\|\|\|\|\|\|\|\|\|\|\|\|\|\|\|\|\|\|\|\|\|\|\|\|\|\|\|\|\|\|\|\|\|\|\|\|\|\|\| |
| a576 | FTEAMQAVYDGKEIKMTEEQAQEVMMKFLQEQQAKAVEKHKADAKANKEKGEAFLKENAA |
| | 90 100 110 120 130 140 |
| | 100 110 120 130 140 150 |
| m576.pep | KDGVKTTASGLQYKITKQGEGKQPTKDDIVTVEYEGRLIDGTVFDSSKANGGPVTFPLSQ |
| a576 | KDGVKTTASGLQYKITKQGEGKQPTKDDIVTVEYEGRLIDGTVFDSSKANGGPVTFPLSQ |
| | 150 160 170 180 190 200 |
| | 160 170 180 190 200 210 |
| m576.pep | VIPGWTEGVQLLKEGGEATFYIPSNLAYREQGAGDKIGPNATLVFDVKLVKIGAPENAPA |
| a576 | VILGWTEGVQLLKEGGEATFYIPSNLAYREQGAGDKIGPNATLVFDVKLVKIGAPENAPA |
| | 210 220 230 240 250 260 |
| | 220 |
| m576.pep | KQPAQVDIKKVNX |
| | \|\|\|\|\|\|\|\|\|\|\|\|\| |
| a576 | KQPAQVDIKKVNX |
| | 270 |

[0303] Further work revealed the following DNA sequence identified in N. meningitidis <SEQ ID 26>:

m576-1.seq

| | |
|---|---|
| 1 | ATGAACACCA TTTTCAAAAT CAGCGCACTG ACCCTTTCCG |
| | CCGCTTTGGC |
| 51 | ACTTTCCGCC TGCGGCAAAA AAGAAGCCGC CCCCGCATCT |
| | GCATCCGAAC |
| 101 | CTGCCGCCGC TTCTTCCGCG CAGGGCGACA CCTCTTCGAT |
| | CGGCAGCACG |
| 151 | ATGCAGCAGG CAAGCTATGC GATGGGCGTG GACATCGGAC |
| | GCTCCCTGAA |
| 201 | GCAAATGAAG GAACAGGGCG CGGAAATCGA TTTGAAAGTC |
| | TTTACCGAAG |
| 251 | CCATGCAGGC AGTGTATGAC GGCAAAGAAA TCAAAATGAC |
| | CGAAGAGCAG |
| 301 | GCTCAGGAAG TCATGATGAA ATTCCTTCAG GAACAACAGG |
| | CTAAAGCCGT |
| 351 | AGAAAAACAC AAGGCGGACG CGAAGGCCAA TAAAGAAAAA |
| | GGCGAAGCCT |
| 401 | TTCTGAAAGA AAATGCCGCC AAAGACGGCG TGAAGACCAC |
| | TGCTTCCGGC |
| 451 | CTGCAATACA AAATCACCAA ACAGGGCGAA GGCAAACAGC |
| | CGACCAAAGA |
| 501 | CGACATCGTT ACCGTGGAAT ACGAAGGCCG CCTGATTGAC |
| | GGTACGGTAT |
| 551 | TCGACAGCAG CAAAGCCAAC GGCGGCCCGG TCACCTTCCC |
| | TTTGAGCCAA |
| 601 | GTGATTCCGG GTTGGACCGA AGGCGTACAG CTTCTGAAAG |
| | AAGGCGGCGA |
| 651 | AGCCACGTTC TACATCCCGT CCAACGTTGC CTACCGCGAA |
| | CAGGGTGCGG |
| 701 | GCGACAAAAT CGGTCCGAAC GCCACTTTGG TATTTGATGT |
| | GAAACTGGTC |
| 751 | AAAATCGGCG CACCCGAAAA CGCGCCCGCC AAGCAGCCGG |
| | CTCAAGTCGA |
| 801 | CATCAAAAAA GTAAATTAA |

[0304] This corresponds to the amino acid sequence <SEQ ID 27; ORF 576-1>:

m576-1.pep

| | |
|---|---|
| 1 | MNTIFKISAL TLSAALALSA CGKKEAAPAS ASEPAAASSA |
| | QGDTSSIGST |
| 51 | MQQASYAMGV DIGRSLKQMK EQGAEIDLKV FTEAMQAVYD |
| | GKEIKMTEEQ |
| 101 | AQEVMMKFLQ EQQAKAVEKH KADAKANKEK GEAFLKENAA |
| | KDGVKTTASG |
| 151 | LQYKITKQGE GKQPTKDDIV TVEYEGRLID GTVFDSSKAN |
| | GGPVTFPLSQ |
| 201 | VIPGWTEGVQ LLKEGGEATF YIPSNLAYRE QGAGDKIGPN |
| | ATLVFDVKLV |
| 251 | KIGAPENAPA KQPAQVDIKK VN* |

[0305] The following DNA sequence was identified in N. gonorrhoeae <SEQ ID 28>:

g576-1.seq

| | |
|---|---|
| 1 | ATGAACACCA TTTTCAAAAT CAGCGCACTG ACCCTTTCCG |
| | CCGCTTTGGC |
| 51 | ACTTTCCGCC TGCGGCAAAA AAGAAGCCGC CCCCGCATCT |
| | GCATCCGAAC |
| 101 | CTGCCGCCGC TTCTGCCGCG CAGGGCGACA CCTCTTCAAT |
| | CGGCAGCACG |
| 151 | ATGCAGCAGG CAAGCTATGC AATGGGCGTG GACATCGGAC |
| | GCTCCCTGAA |
| 201 | ACAAATGAAG GAACAGGGCG CGGAAATCGA TTTGAAAGTC |
| | TTTACCGATG |
| 251 | CCATGCAGGC AGTGTATGAC GGCAAAGAAA TCAAAATGAC |
| | CGAAGAGCAG |
| 301 | GCCCAGGAAG TGATGATGAA ATTCCTGCAG GAGCAGCAGG |
| | CTAAAGCCGT |
| 351 | AGAAAAACAC AAGGCGGATG CGAAGGCCAA CAAAGAAAAA |
| | GGCGAACCT |
| 401 | TCCTGAAGGA AAATGCCGCC AAAGACGGCG TGAAGACCAC |
| | TGCTTCCGGT |
| 451 | CTGCAGTACA AAATCACCAA ACAGGGTGAA GGCAAACAGC |
| | CGACAAAAGA |
| 501 | CGACATCGTT ACCGTGGAAT ACGAAGGCCG CCTGATTGAC |
| | GGTACCGTAT |
| 551 | TCGACAGCAG CAAAGCCAAC GGCGGCCCGG CCACCTTCCC |
| | TTTGAGCCAA |
| 601 | GTGATTCCGG GTTGGACCGA AGGCGTACGG CTTCTGAAAG |
| | AAGGCGGCGA |
| 651 | AGCCACGTTC TACATCCCGT CCAACCTTGC CTACCGCGAA |
| | CAGGGTGCGG |
| 701 | GCGAAAAAAT CGGTCCGAAC GCCACTTTGG TATTTGACGT |
| | GAAACTGGTC |
| 751 | AAAATCGGCG CACCCGAAAA CGCGCCCGCC AAGCAGCCGG |
| | ATCAAGTCGA |
| 801 | CATCAAAAAA GTAAATTAA |

[0306] This corresponds to the amino acid sequence <SEQ ID 29; ORF 576-1.ng>:

| g576-1.pep | |
|---|---|
| 1 | MNTIFKISAL TLSAALALSA CGKKEAAPAS ASEPAAASAA QGDTSSIGST |
| 51 | MQQASYAMGV DIGRSLKQMK EQGAEIDLKV FTDAMQAVYD GKEIKMTEEQ |
| 101 | AQEVMMKFLQ EQQAKAVEKH KADAKANKEK GEAFLKENAA KDGVKTTASG |
| 151 | LQYKITKQGE GKQPTKDDIV TVEYEGRLID GTVFDSSKAN GGPATFPLSQ |
| 201 | VIPGWTEGVR LLKEGGEATF YIPSNLAYRE QGAGEKIGPN ALTVFDVKLV |
| 251 | KIGAPENAPA DQPDQVDIKK VN* |

| | |
|---|---|
| g576-1/m576-1 | ORFs 576-1 and 576-1.ng showed a 97.8% identity in 272 an overlap |
| | 10 20 30 40 50 60 |
| g576-1.pep | MNTIFKISALTLSAALALSACGKKEAAPASASEPAAASAAQGDTSSIGSTMQQASYAMGV |
| | \|\|\|\|\|\|\|\|\|\|\|\|\|\|\|\|\|\|\|\|\|\|\|\|\|\|\|\|\|\|\|\|\|\|\|\|\|\|\|\|:\|\|\|\|\|\|\|\|\|\|\|\|\|\|\|\|\|\|\| |
| m576-1 | MNTIFKISALTLSAALALSACGKKEAAPASASEPAAASSAQGDTSSIGSTMQQASYAMGV |
| | 10 20 30 40 50 60 |
| | 70 80 90 100 110 120 |
| g576-1.pep | DIGRSLKQMKEQGAEIDLKVFTDAMQAVYDGKEIKMTEEQAQEVMMKFLQEQQAKAVEKH |
| | \|\|\|\|\|\|\|\|\|\|\|\|\|\|\|\|\|\|\|\|\|\|:\|\|\|\|\|\|\|\|\|\|\|\|\|\|\|\|\|\|\|\|\|\|\|\|\|\|\|\|\|\|\|\|\|\|\|\|\| |
| m576-1 | DIGRSLKQMKEQGAEIDLKVFTEAMQAVYDGKEIKMTEEQAQEVMMKFLQEQQAKAVEKH |
| | 70 80 90 100 110 120 |
| | 130 140 150 160 170 180 |
| g576-1.pep | KADAKANKEKGEAFLKENAAKDGVKTTASGLQYKITKQGEGKQPTKDDIVTVEYEGRLID |
| | \|\|\|\|\|\|\|\|\|\|\|\|\|\|\|\|\|\|\|\|\|\|\|\|\|\|\|\|\|\|\|\|\|\|\|\|\|\|\|\|\|\|\|\|\|\|\|\|\|\|\|\|\|\|\|\|\|\|\|\| |
| m576-1 | KADAKANKEKGEAFLKENAAKDGVKTTASGLQYKITKQGEGKQPTKDDIVTVEYEGRLID |
| | 130 140 150 160 170 180 |
| | 190 200 210 220 230 240 |
| g576-1.pep | GTVFDSSKANGGPATFPLSQVIPGWTEGVRLLKEGGEATFYIPSNLAYREQGAGEKIGPN |
| | \|\|\|\|\|\|\|\|\|\|\|\|\|:\|\|\|\|\|\|\|\|\|\|\|\|\|\|\|:\|\|\|\|\|\|\|\|\|\|\|\|\|\|\|\|\|\|\|\|\|\|\|\|:\|\|\|\|\| |
| m576-1 | GTVFDSSKANGGPVTFPLSQVIPGWTEGVQLLKEGGEATFYIPSNLAYREQGAGDKIGPN |
| | 190 200 210 220 230 240 |
| | 250 260 270 |
| g576-1.pep | ATLVFDVKLVKIGAPENAPAKQPDQVDIKKVNX |
| | \|\|\|\|\|\|\|\|\|\|\|\|\|\|\|\|\|\|\|\|\|\|\| \|\|\|\|\|\|\|\|\| |
| m576-1 | ATLVFDVKLVKIGAPENAPAKQPAQVDIKKVNX |
| | 250 260 270 |

[0307] The following partial DNA sequence was identified in N. meningitidis <SEQ ID 30>:

a576-1.seq

| | |
|---|---|
| 1 | ATGAACACCA TTTTCAAAAT CAGCGCACTG ACCCTTTCCG |
| | CCGCTTTGGC |
| 51 | ACTTTCGCCC TGCGGCAAAA AAGAAGCCGC CCCCGCATCT |
| | GCATCCGAAC |
| 101 | CTGCCGCCGC TTCTTCCGCG CAGGGCGACA CCTCTTCGAT |
| | CGGCAGCACG |
| 151 | ATGCAGCAGG CAAGCTATGC GATGGGCGTG GACATCGGAC |
| | GCTCCCTGAA |
| 201 | GCAAATGAAG GAACAGGGCG CGGAAATCGA TTTGAAAGTC |
| | TTTACCGAAG |
| 251 | CCATGCAGGC AGTGTATGAC GGCAAAGAAA TCAAAATGAC |
| | CGAAGAGCAG |
| 301 | GCTCAGGAAG TCATGATGAA ATTCCTTCAG GAACAACAGG |
| | CTAAAGCCGT |
| 351 | AGAAAAACAC AAGGCGGACG CGAAGGCCAA TAAAGAAAAA |
| | GGCGAAGCCT |
| 401 | TTCTGAAAGA AAATGCCGCC AAAGACGGCG TGAAGACCAC |
| | TGCTTCCGGC |
| 451 | CTGCAATACA AAATCACCAA ACAGGGCGAA GGCAAACAGC |
| | CGACCAAAGA |
| 501 | CGACATCGTT ACCGTGGAAT ACGAAGGCCG CCTGATTGAC |
| | GGTACGGTAT |
| 551 | TCGACAGCAG CAAAGCCAAC GGCGGCCCGG TCACCTTCCC |
| | TTTGAGCCAA |
| 601 | GTGATTCTGG GTTGGAGCGA AGGCGTACAG CTTCTGAAAG |
| | AAGGCGGCGA |
| 651 | AGCCACGTTC TACATCCCGT CCAACCTTGC CTACCGCGAA |
| | CAGGGTGCGG |
| 701 | GCGACAAAAT CGGCCCGAAC GCCACTTTGG TATTTGATGT |
| | GAAACTGGTC |
| 751 | AAAATCGGCG CACCCGAAAA CGCGCCCGCC AAGCAGCCGG |
| | CTCAAGTCGA |
| 801 | CATGAAAAAA GTAAATTTAA |

[0308] This corresponds to the amino acid sequence <SEQ ID 31; ORF 576-1.a>:

| a576-1.pep | |
|---|---|
| 1 | MNTIFKISAL TLSAALALSA CGKKEAAPAS ASEPAAASSA QGDTSSIGST |
| 51 | MQQASYAMGV DIGRSLKQMK EQGAEIDLKV FTEAMQAVYD GKEIKMTEEQ |
| 101 | AQEVMMKFLQ EQQAKAVEKH KADAKANKEK GEAFLKENAA KDGVKTTASG |
| 151 | LQYKITKQGE GKQPTKDDIV TVEYEGRLID GTVFDSSKAN GGPVTFPLSQ |
| 201 | VILGWTEGVQ LLKEGGEATF YIPSNLAYRE QGAGDKIGPN ATLVFDVKLV |
| 251 | KIGAPENAPA KQPAQVDIKK VN* |

| | |
|---|---|
| a576-1/m576-1 | ORFs 576-1 and 576-1.a 99.6% identity in 272 aa overlap |
| | 10 20 30 40 50 60 |
| a576-1.pep | MNTIFKISALTLSAALALSACGKKEAAPASASEPAAASSAQGDTSSIGSTMQQASYAMGV |
| | \|\|\|\|\|\|\|\|\|\|\|\|\|\|\|\|\|\|\|\|\|\|\|\|\|\|\|\|\|\|\|\|\|\|\|\|\|\|\|\|\|\|\|\|\|\|\|\|\|\|\|\|\|\|\|\|\|\|\|\| |
| m576-1 | MNTIFKISALTLSAALALSACGKKEAAPASASEPAAASSAQGDTSSIGSTMQQASYAMGV |
| | 10 20 30 40 50 60 |
| | 70 80 90 100 110 120 |
| a576-1.pep | DIGRSLKQMKEQGAEIDLKVFTEAMQAVYDGKEIKMTEEQAQEVMMKFLQEQQAKAVEKH |
| | \|\|\|\|\|\|\|\|\|\|\|\|\|\|\|\|\|\|\|\|\|\|\|\|\|\|\|\|\|\|\|\|\|\|\|\|\|\|\|\|\|\|\|\|\|\|\|\|\|\|\|\|\|\|\|\|\|\|\|\| |
| m576-1 | DIGRSLKQMKEQGAEIDLKVFTEAMQAVYDGKEIKMTEEQAQEVMMKFLQEQQAKAVEKH |
| | 70 80 90 100 110 120 |
| | 130 140 150 160 170 180 |
| a576-1.pep | KADAKANKEKGEAFLKENAAKDGVKTTASGLQYKITKQGEGKQPTKDDIVTVEYEGRLID |
| | \|\|\|\|\|\|\|\|\|\|\|\|\|\|\|\|\|\|\|\|\|\|\|\|\|\|\|\|\|\|\|\|\|\|\|\|\|\|\|\|\|\|\|\|\|\|\|\|\|\|\|\|\|\|\|\|\|\|\|\| |
| m576-1 | KADAKANKEKGEAFLKENAAKDGVKTTASGLQYKITKQGEGKQPTKDDIVTVEYEGRLID |
| | 130 140 150 160 170 180 |
| | 190 200 210 220 230 240 |
| a576-1.pep | GTVFDSSKANGGPVTFPLSQVILGWTEGVQLLKEGGEATFYIPSNLAYREQGAGDKIGPN |
| | \|\|\|\|\|\|\|\|\|\|\|\|\|\|\|\|\|\|\|\|\|\|:\|\|\|\|\|\|\|\|\|\|\|\|\|\|\|\|\|\|\|\|\|\|\|\|\|\|\|\|\|\|\|\|\|\|\|\|\| |
| m576-1 | GTVFDSSKANGGPVTFPLSQVIPGWTEGVQLLKEGGEATFYIPSNLAYREQGAGDKIGPN |
| | 190 200 210 220 230 240 |
| | 250 260 270 |
| a576-1.pep | ATLVFDVKLVKIGAPENAPAKQPAQVDIKKVNX |
| | \|\|\|\|\|\|\|\|\|\|\|\|\|\|\|\|\|\|\|\|\|\|\|\|\|\|\|\|\|\|\|\|\| |
| m576-1 | ATLVFDVKLVKIGAPENAPAKQPAQVDIKKVNX |
| | 250 260 270 |

919 and 919-2 gnm43.seq

[0309] The following partial DNA sequence was identified in N. meningitidis <SEQ ID 32>:

m919.seq

| | |
|---|---|
| 1 | ATGAAAAAAT ACCTATTCCG CGCCGCCCTG TACGGCATCG |
| | CCGCCGCCAT |
| 51 | CCTCGCCGCC TGCCAAAGCA AGAGCATCCA AACCTTTCCG |
| | CAACCCGACA |
| 101 | CATCCGTCAT CAACGGCCCG GACCGGCCGG TCGGCATCCC |
| | CGACCCCGCC |
| 151 | GGAACGACGG TCGGCGGCGG CGGGGCCGTC TATACCGTTG |
| | TACCGCACCT |
| 201 | GTCCCTGCCC CACTGGGCGG CGCAGGATTT CGCCAAAAGC |
| | CTGCAATCCT |
| 251 | TCCGCCTCGG CTGCGCCAAT TTGAAAAACC GCCAAGGCTG |
| | GCAGGATGTG |
| 301 | TGCGCCCAAG CCTTTCAAAC CCCCGTCCAT TCCTTTCAGG |
| | CAAAACAGTT |
| 351 | TTTTGAACGC TATTTCACGC CGTGGCAGGT TGCAGGCAAC |
| | GGAAGCCTTG |
| 401 | CCGGTACGGT TACCGGCTAT TACGAACCGG TGCTGAAGGG |
| | CGACGACAGG |
| 451 | CGGACGGCAC AAGCCCGCTT CCCGATTTAC GGTATTCCCG |
| | ACGATTTTAT |
| 501 | CTCCGTCCCC CTGCCTGCCG GTTTGCGGAG CGGAAAAGCC |
| | CTTGTCCGCA |
| 551 | TCAGGCAGAC GGGAAAAAAC AGCGGCACAA TCGACAATAC |
| | CGGCGGCACA |
| 601 | CATACCGCCG ACCTCTCCcG ATTCCCCATC ACCGCGCGCA |
| | CAACAGCAAT |
| 651 | CAAAGGCAGG TTTGAAGGAA GCCGCTTCCT CCCCTACCAC |
| | ACGCGCAACC |
| 701 | AAATCAACGG CGGCGCGCTT GACGGCAAAG CCCCGATACT |
| | CGGTTACGCC |
| 751 | GAAGACCCTG TCGAACTTTT TTTTATGCAC ATCCAAGGCT |
| | CGGGCCGTCT |
| 801 | GAAAACCCCG TCCGGCAAAT ACATCCGCAT CGGCTATGCC |
| | GACAAAAACG |
| 851 | AACATCCyTA CGTTTCCATC GGACGCTATA TGGCGGATAA |
| | GGGCTACCTC |
| 901 | AAACTCGGAC AAACCTCCAT GCAGGGCATT AAGTCTTATA |
| | TGCGGCAAAA |
| 951 | TCCGCAACGC CTCGCCGAAG TTTTGGGTCA AAACCCCAGC |
| | TATATCTTTT |
| 1001 | TCCGCGAGCT TGCCGGAAGC AGCAATGACG GCCCTGTCGG |
| | CGCACTGGGC |
| 1051 | ACGCCGCTGA TGGGGGAATA TGCCGGCGCA GTCGACCGGC |
| | ACTACATTAC |
| 1101 | CTTGGGTGCG CCCTTATTTG TCGCCACCGC CCATCCGGTT |
| | ACCCGCAAAG |
| 1151 | CCCTCAACCG CCTGATTATG GCGCAGGATA CCGGCAGCGC |
| | GATTAAAGGC |
| 1201 | GCGGTGCGCG TGGATTATTT TTGGGGATAC GGCGACGAAG |
| | CCGGCGAACT |
| 1251 | TGCCGGCAAA CAGAAAACCA CGGGATATGT CTGGCAGCTC |
| | CTACCCAACG |
| 1301 | GTATGAAGCC CGAATACCGc CCGTAA |

[0310] This corresponds to the amino acid sequence <SEQ ID 33; ORF 919>:

m919.pep

| | |
|---|---|
| 1 | MKKYLFRAAL YGIAAAILAA CQSKSIQTFP QPDTSVINGP |
| | DRPVGIPDPA |
| 51 | GTTVGGGGAV YTVVPHLSLP HWAAQDFAKS LQSFRLGCAN |
| | LKNRQGWQDV |
| 101 | CAQAFQTPVH SFQAKQFFER YFTPWQVAGN GSLAGTVTGY |
| | YEPVLKGDDR |
| 151 | RTAQARFPIY GIPDDFISVP LPAGLRSGKA LVRIRQTGKN |
| | SGTIDNTGGT |
| 201 | HTADLSRFPI TARTTAIKGR FEGSRFLPYH TRNQINGGAL |
| | DGKAPILGYA |
| 251 | EDPVELFFMH IQGSGRLKTP SGKYIRIGYA DKNEHPYVSI |
| | GRYMADKGYL |
| 301 | KLGQTSMQGI KSYMRQNPQR LAEVLGQNPS YIFFRELAGS |
| | SNDGPVGALG |
| 351 | TPLMGEYAGA VDRHYITLGA PLFVATAHPV TRKALNRLIM |
| | AQDTGSAIKG |
| 401 | AVRYDYFWGY GDEAGELAGK QKTTGYVWQL LPNGMKPEYR |
| | P* |

[0311] The following partial DNA sequence was identified in N. meningitidis <SEQ ID 34>:

m919-2.seq

| | |
|---|---|
| 1 | ATGAAAAAAT ACCTATTCCG CGCCGCCCTG TACGGCATCG |
| | CCGCCGCCAT |
| 51 | CCTCGCCGCC TGCCAAAGCA AGAGCATCCA AACCTTTCCG |
| | CAACCCGACA |
| 101 | CATCCGTCAT CAACGGCCCG GACCGGCCGG TCGGCATCCC |
| | CGACCCCGCC |
| 151 | GGAACGACGG TCGGCGGCGG CGGGGCCGTC TATACCGTTG |
| | TACCGCACCT |
| 201 | GTCCCTGCCC CACTGGGCGG CGCAGGATTT CGCCAAAAGC |
| | CTGCAATCCT |
| 251 | TCCGCCTCGG CTGCGCCAAT TTGAAAAACC GCCAAGGCTG |
| | GCAGGATGTG |
| 301 | TGCGCCCAAG CCTTTCAAAC CCCCGTCCAT TCCTTTCAGG |
| | CAAAACAGTT |
| 351 | TTTTGAACGC TATTTCACGC CGTGGCAGGT TGCAGGCAAC |
| | GGAAGCCTTG |
| 401 | CCGGTACGGT TACCGGCTAT TACGAACCGG TGCTGAAGGG |
| | CGACGACAGG |
| 451 | CGGACGGCAC AAGCCCGCTT CCCGATTTAC GGTATTCCCG |
| | ACGATTTTAT |
| 501 | CTCCGTCCCC CTGCCTGCCG GTTTGCGGAG CGGAAAAGCC |
| | CTTGTCCGCA |
| 551 | TCAGGCAGAC GGGAAAAAAC AGCGGCACAA TCGACAATAC |
| | CGGCGGCACA |
| 601 | CATACCGCCG ACCTCTCCCG ATTCCCCATC ACCGCGCGCA |
| | CAACAGCAAT |
| 651 | CAAAGGCAGG TTTGAAGGAA GCCGCTTCCT CCCCTACCAC |
| | ACGCGCAACC |
| 701 | AAATCAACGG CGGCGCGCTT GACGGCAAAG CCCCGATACT |
| | CGGTTACGCC |
| 751 | GAAGACCCTG TCGAACTTTT TTTTATGCAC ATCCAAGGCT |
| | CGGGCCGTCT |
| 801 | GAAAACCCCG TCCGGCAAAT ACATCCGCAT CGGCTATGCC |
| | GACAAAAACG |
| 851 | AACATCCCTA CGTTTCCATC GGACGCTATA TGGCGGATAA |
| | GGGCTACCTC |
| 901 | AAACTCGGAC AAACCTCCAT GCAGGGCATT AAGTCTTATA |
| | TGCGGCAAAA |
| 951 | TCCGCAACGC CTCGCCGAAG TTTTGGGTCA AAACCCCAGC |
| | TATATCTTTT |
| 1001 | TCCGCGAGCT TGCCGGAAGC AGCAATGACG GCCCTGTCGG |
| | CGCACTGGGC |
| 1051 | ACGCCGCTGA TGGGGGAATA TGCCGGCGCA GTCGACCGGC |
| | ACTACATTAC |
| 1101 | CTTGGGTGCG CCCTTATTTG TCGCCACCGC CCATCCGGTT |
| | ACCCGCAAAG |
| 1151 | CCCTCAACCG CCTGATTATG GCGCAGGATA CCGGCAGCGC |
| | GATTAAAGGC |
| 1201 | GCGGTGCGCG TGGATTATTT TTGGGGATAC GGCGACGAAG |
| | CCGGCGAACT |
| 1251 | TGCCGGCAAA CAGAAAACCA CGGGATATGT CTGGCAGCTC |
| | CTACCCAACG |
| 1301 | GTATGAAGCC CGAATACCGC CCGTAA |

[0312] This corresponds to the amino acid sequence <SEQ ID 35; ORF 919-2>:

m919-2.pep

| | |
|---|---|
| 1 | MKKYLFRAAL YGIAAAILAA CQSKSIQTFP QPDTSVINGP |
| | DRPVGIPDPA |
| 51 | GTTVGGGGAV YTVVPHLSLP HWAAQDFAKS LQSFRLGCAN |
| | LKNRQGWQDV |
| 101 | CAQAFQTPVH SFQAKQFFER YFTPWQVAGN GSLAGTVTGY |
| | YEPVLKGDDR |
| 151 | RTAQARFPIY GIPDDFISVP LPAGLRSGKA LVRIRQTGKN |
| | SGTIDNTGGT |
| 201 | HTADLSRFPI TARTTAIKGR FEGSRFLPYH TRNQINGGAL |
| | DGKAPILGYA |
| 251 | EDPVELFFMH IQGSGRLKTP SGKYIRIFYA DKNEHPYVSI |
| | GRYMADKGYL |
| 301 | KLGQTSMQGI KSYMRQNPQR LAEVLGQNPS YIFFRELAGS |
| | SNDGPVGALG |
| 351 | TPLMGEYAGA VDRHYITLGA PLFVATAHPV TRKALNRLIM |
| | AQDTGSAIKG |
| 401 | AVRVDYFWGY GDEAGELAGK QKTTGYVWQL LPNGMKPEYR |
| | P* |

[0313] The following partial DNA sequence was identified in N. gonorrhoeae <SEQ ID 36>:

```
g919.seq
      1 ATGAAAAAAC ACCTGCTCCG CTCCGCCCTG TACGGcatCG CCGCCgccAT
    51 CctcgCCGCC TGCCAAAgca gGAGCATCCA AACCTTTCCG CAACCCGACA
  101 CATCCGTCAT CAACGGCCCG GACCGGCCGG CCGGCATCCC CGACCCCGCC
  151 GGAACGACGG TTGCCGGCGG CGGGGCCGTC TATACCGTTG TGCCGCACCT
  201 GTCCATGCCC CACTGGGCGG CGCaggATTT TGCCAAAAGC CTGCAATCCT
  251 TCCGCCTCGG CTGCGCCAAT TTGAAAAACC GCCAAGGCTG GCAGGATGTG
  301 TGCGCCCAAG CCTTTCAAAC CCCCGTGCAT TCCTTTCAGG CAAAGcGgTT
  351 TTTTGAACGC TATTTCACGC cgtGGCaggt tgcaggcaAC GGAAGcCTTG
  401 Caggtacggt TACCGGCTAT TACGAACCGG TGCTGAAGGG CGACGGCAGG
  451 CGGACGGAAC GGGCCCGCTT CCCGATTTAC GGTATTCCCG ACGATTTTAT
  501 CTCCGTCCCG CTGCCTGCCG GTTTGCGGGG CGGAAAAAAC CTTGTCCGCA
  551 TCAGGCAGac ggGGAAAAAC AGCGGCACGA TCGACAATGC CGGCGGCACG
  601 CATACCGCCG ACCTCTCCCG ATTCCCCATC ACCGCGCGCA CAACGGcaat
  651 caaaGGCAGG TTTGAaggAA GCCGCTTCCT CCCTTACCAC ACGCGCAACC
  701 AAAtcaacGG CGGCgcgcTT GACGGCAAag cccCCATCCT CggttacgcC
  751 GAagaccCcG tcgaacttTT TTTCATGCAC AtccaaggCT CGGGCCGCCT
  801 GAAAACCCcg tccggcaaat acatCCGCAt cggaTacgcc gacAAAAACG
  851 AACAtccgTa tgtttccatc ggACGctaTA TGGCGGACAA AGGCTACCTC
  901 AAGctcgggc agACCTCGAT GCAGGgcatc aaagcCTATA TGCGGCAAAA
  951 TCCGCAACGC CTCGCCGAAG TTTTGGGTCA AAACCCCAGC TATATCTTTT
1001 TCCGCGAGCT TGCCGGAAGC GGCAATGAGG GCCCCGTCGG CGCACTGGGC
1051 ACGCCACTGA TGGGGGAATA CGCCGGCGCA ATCGACCGGC ACTACATTAC
1101 CTTGGGCGCG CCCTTATTTG TCGCCACCGC CCATCCGGTT ACCCGGAAAG
1151 CCCTCAACCG CCTGATTATG GCGCAGGATA CAGGCAGCGC GATCAAAGGC
1201 GGGGTGCGCG TGGATTATTT TTGGGGTTAC GGCGACGAAG CCGGCGAACT
1251 TGCCGGCAAA CAGAAAACCA CGGGATACGT CTGGCAGCTC CTGCCCAACG
1301 GCATGAAGCC CGAATACCGC CGGTGA
```

[0314] This corresponds to the amino acid sequence <SEQ ID 37; ORF 919.ng>:

```
g919.pep
    1 MKKHLLRSAL YGIAAAILAA CQSRSIQTFP QPDTSVINGP DRPAGIPDPA
  51 GTTVAGGGAV YTVVPHLSMP HWAAQDFAKS LQSFRLGCAN LKNRQGWQDV
101 CAQAFQTPVH SFQAKRFFER YFTPWQVAGN GSLAGTVTGY YEPVLKGDGR
151 RTERARFPIY GIPDDFISVP LPAGLRGGKN LVRIRQTGKN SGTIDNAGGT
201 HTADLSRFPI TARTTAIKGR FEGSRFLPYH TRNQINGGAL DGKAPILGYA
251 EDPVELFFMH IQGSGRLKTP SGKYIRIGYA DKNEHPYVSI GRYMADKGYL
301 KLGQTSMQGI KAYMRQNPQR LAEVLGQNPS YIFFRELAGS GNEGPVGALG
351 TPLMGEYAGA IDRHYITLGA PLFVATAHPV TRKALNRLIM AQDTGSAIKG
401 AVRVDYFWGY GDEAGELAGK QKTTGYVWQL LPNGMKPEYR P*
```

[0315] ORF 919 shows 95.9% identity over a 441 aa overlap with a predicted ORF (ORF 919.ng) from N. gonorrhoeae:

```
m919/g919
                  10 20 30 40 50 60
m919.pep MKKYLFRAALYGIAAAILAACQSKSIQTFPQPDTSVINGPDRPVGIPDPAGTTVGGGGAV
            |||:|:|:|||||||||||||||:|||||||||||||||||||:||||||||||:|||||
g919 MKKHLLRSALYGIAAAILAACQSRSIQTFPQPDTSVINGPDRPAGIPDPAGTTVAGGGAV
                  10 20 30 40 50 60
                  70 80 90 100 110 120
m919.pep YTVVPHLSLPHWAAQDFAKSLQSFRLGCANLKNRQGWQDVCAQAFQTPVHSFQAKQFFER
            ||||||||:||||||||||||||||||||||||||||||||||||||||||||||:||||
g919 YTVVPHLSMPHWAAQDFAKSLQSFRLGCANLKNRQGWQDVCAQAFQTPVHSFQAKRFFER
                  70 80 90 100 110 120
                  130 140 150 160 170 180
m919.pep YFTPWQVAGNGSLAGTVTGYYEPVLKGDDRRTAQARFPIYGIPDDFISVPLPAGLRSGKA
            |||||||||||||||||||||||||||| ||| :|||||||||||||||||||||||:||
g919 YFTPWQVAGNGSLAGTVTGYYEPVLKGDGRRTERARFPIYGIPDDFISVPLPAGLRGGKN
                  130 140 150 160 170 180
                  190 200 210 220 230 240
m919.pep LVRIRQTGKNSGTIDNTGGTHTADLSRFPITARTTAIKGRFEGSRFLPYHTRNQINGGAL
            ||||||||||||||||:|||||||||||||||||||||||||||||||||||||||||||
g919 LVRIRQTGKNSGTIDNAGGTHTADLSRFPITARTTAIKGRFEGSRFLPYHTRNQINGGAL
                  190 200 210 220 230 240
                  250 260 270 280 290 300
m919.pep DGKAPILGYAEDPVELFFMHIQGSGRLKTPSGKYIRIGYADKNEHPYVSIGRYMADKGYL
            ||||||||||||||||||||||||||||||||||||||||||||||||||||||||||||
g919 DGKAPILGYAEDPVELFFMHIQGSGRLKTPSGKYIRIGYADKNEHPYVSIGRYMADKGYL
                  250 260 270 280 290 300
                  310 320 330 340 350 360
m919.pep KLGQTSMQGIKSYMRQNPQRLAEVLGQNPSYIFFRELAGSSNDGPVGALGTPLMGEYAGA
            |||||||||||:||||||||||||||||||||||||||||:|:|||||||||||||||||
g919 KLGQTSMQGIKAYMRQNPQRLAEVLGQNPSYIFFRELAGSGNEGPVGALGTPLMGEYAGA
                  310 320 330 340 350 360
                  370 380 390 400 410 420
m919.pep VDRHYITLGAPLFVATAHPVTRKALNRLIMAQDTGSAIKGAVRVDYFWGYGDEAGELAGK
            :|||||||||||||||||||||||||||||||||||||||||||||||||||||||||||
g919 IDRHYITLGAPLFVATAHPVTRKALNRLIMAQDTGSAIKGAVRVDYFWGYGDEAGELAGK
                  370 380 390 400 410 420
                  430 440
m919.pep QKTTGYVWQLLPNGMKPEYRPX
            ||||||||||||||||||||||
g919 QKTTGYVWQLLPNGMKPEYRPX
                  430 440
```

[0316] The following partial DNA sequence was identified in N. meningitidis <SEQ ID 38>:

```
a919.seq
      1 ATGAAAAAAT ACCTATTCCG CGCCGCCCTG TGCGGCATCG CCGCCGCCAT
    51 CCTCGCCGCC TGCCAAAGCA AGAGCATCCA AACCTTTCCG CAACCCGACA
  101 CATCCGTCAT CAACGGCCCG GACCGGCCGG TCGGCATCCC CGACCCCGCC
  151 GGAACGACGG TCGGCGGCGG CGGGGCCGTT TATACCGTTG TGCCGCACCT
  201 GTCCCTGCCC CACTGGGCGG CGCAGGATTT CGCCAAAAGC CTGCAATCCT
  251 TCCGCCTCGG CTGCGCCAAT TTGAAAAACC GCCAAGGCTG GCAGGATGTG
  301 TGCGCCCAAG CCTTTCAAAC CCCCGTCCAT TCCGTTCAGG CAAAACAGTT
  351 TTTTGAACGC TATTTCACGC CGTGGCAGGT TGCAGGCAAC GGAAGCCTTG
  401 CCGGTACGGT TACCGGCTAT TACGAGCCGG TGCTGAAGGG CGACGACAGG
  451 CGGACGGCAC AAGCCCGCTT CCCGATTTAC GGTATTCCCG ACGATTTTAT
  501 CTCCGTCCCC CTGCCTGCCG GTTTGCGGAG CGGAAAAGCC CTTGTCGGCA
  551 TCAGGCAGAC GGGAAAAAAC AGCGGCACAA TCGACAATAC CGGCGGCACA
  601 CATACCGCCG ACCTCTCCGA ATTCCCCATC ACTGCGCGCA CAACGGCAAT
  651 CAAAGGCAGG TTTGAAGGAA GCCGCTTCCT CCCCTACCAC ACGCGCAACC
  701 AAATCAACGG CGGCGCGCTT GACGGCAAAG CCCCGATACT CGGTTACGCC
  751 GAAGACCCCG TCGAACTTTT TTTTATGCAC ATCCAAGGCT CGGGCCGTCT
  801 GAAAACCCCG TCCGGCAAAT ACATCCGCAT CGGCTATGCC GACAAAAACG
  851 AACATCCCTA CGTTTCCATC GGACGCTATA TGGCGGACAA AGGCTACCTC
  901 AAGCTCGGGC AGACCTCGAT GCAGGGCATC AAAGCCTATA TGCAGCAAAA
  951 CCCGCAACGC CTCGCCGAAG TTTTGGGGCA AAACCCCAGC TATATCTTTT
1001 TCCGAGAGCT TACCGGAAGC AGCAATGACG GCCCTGTCGG CGCACTGGGC
1051 ACGCCGCTGA TGGGCGAGTA CGCCGGCGCA GTCGACCGGC ACTACATTAC
1101 CTTGGGCGCG CCCTTATTTG TCGCCACCGC CCATCCGGTT ACCCGCAAAG
1151 CCCTCAACCG CCTGATTATG GCGCAGGATA CCGGCAGCGC GATTAAAGGC
1201 GCGGTGCGCG TGGATTATTT TTGGGGATAC GGCGACGAAG CCGGCGAACT
1251 TGCCGGCAAA CAGAAAACCA CGGGATATGT CTGGCAGCTT CTGCCCAACG
1301 GTATGAAGCC CGAATACCGC CCGTAA
```

[0317] This corresponds to the amino acid sequence <SEQ ID 39; ORF 919.a>:

```
a919.pep
    1 MKKYLFRAAL CGIAAAILAA CQSKSIQTFP QPDTSVINGP DRPVGIPDPA
  51 GTTVGGGGAV YTVVPHLSLP HWAAQDFAKS LQSFRLGCAN LKNRQGWQDV
101 CAQAFQTPVH SVQAKQFFER YFTPWQVAGN GSLAGTVTGY YEPVLKGDDR
151 RTAQARFPIY GIPDDFISVP LPAGLRSGKA LVRIRQTGKN SGTIDNTGGT
201 HTADLSQFPI TARTTAIKGR FEGSRFLPYH TRNQINGGAL DGKAPILGYA
251 EDPVELFFMH IQGSGRLKTP SGKYIRIGYA DKNEHPYVSI GRYMADKGYL
301 KLGQTSMQGI KAYMQQNPQR LAEVLGQNPS YIFFRELTGS SNDGPVGALG
351 TPLMGEYAGA VDRHYITLGA PLFVATAHPV TRKALNRLIM AQDTGSAIKG
401 AVRVDYFWGY GDEAGELAGK QKTTGYVWQL LPNGMKPEYR P*
m919/a919 ORFs 919 and 919.a showed a 98.6% identity in 441 aa
overlap
                  10 20 30 40 50 60
m919.pep MKKYLFRAALYGIAAAILAACQSKSIQTFPQPDTSVINGPDRPVGIPDPAGTTVGGGGAV
            |||||||||| |||||||||||||||||||||||||||||||||||||||||||||||||
a919 MKKYLFRAALCGIAAAILAAGQSKSIQTFPQPDTSVINGPDRPVGIPDPAGTTVGGGGAV
                  10 20 30 40 50 60
                  70 80 90 100 110 120
m919.pep YTVVPHLSLPHWAAQDFAKSLQSFRLGCANLKNRQGWQDVCAQAFQTPVHSFQAKQFFER
            ||||||||||||||||||||||||||||||||||||||||||||||||||| ||||||||
a919 YTVVPHLSLPHWAAQDFAKSLQSFRLGCANLKNRQGWQDVCAQAFQTPVHSVQAKQFFER
                  70 80 90 100 110 120
                  130 140 150 160 170 180
m919.pep YFTPWQVAGNGSLAGTVTGYYEPVLKGDDRRTAQARFPIYGIPDDFISVPLPAGLRSGKA
            ||||||||||||||||||||||||||||||||||||||||||||||||||||||||||||
a919 YFTPWQVAGNGSLAGTVTGYYEPVLKGDDRRTAQARFPIYGIPDDFISVPLPAGLRSGKA
                  130 140 150 160 170 180
                  190 200 210 220 230 240
m919.pep LVRIRQTGKNSGTIDNTGGTHTADLSRFPITARTTAIKGRFEGSRFLPYHTRNQINGGAL
            ||||||||||||||||||||||||||:|||||||||||||||||||||||||||||||||
a919 LVRIRQTGKNSGTIDNTGGThTADLSQFPITARTTAIKGRFEGSRFLPYHTRNQINGGAL
                  190 200 210 220 230 240
                  250 260 270 280 290 300
m919.pep DGKAPILGYAEDPVELFFMHIQGSGRLKTPSGKYIRIGYADKNEHPYVSIGRYMADKGYL
            ||||||||||||||||||||||||||||||||||||||||||||||||||||||||||||
a919 DGKAPILGYAEDPVELFFMHIQGSGRLKTPSGKYIRIGYADKNEHPYVSIGRYMADKGYL
                  250 260 270 280 290 300
                  310 320 330 340 350 360
m919.pep KLGQTSMQGIKSYMRQNPQRLAEVLGQNPSYIFFRELAGSSNDGPVGALGTPLMGEYAGA
            |||||||||||:||:||||||||||||||||||||||:||||||||||||||||||||||
a919 KLGQTSMQGIKAYMQQNPQRLAEVLGQNPSYIFFRELTGSSNDGPVGALGTPLMGEYAGA
                  310 320 330 340 350 360
                  370 380 390 400 410 420
m919.pep VDRHYITLGAPLFVATAHPVTRKALNRLIMAQDTGSAIKGAVRVDYFWGYGDEAGELAGK
            ||||||||||||||||||||||||||||||||||||||||||||||||||||||||||||
a919 VDRHYITLGAPLFVATAHPVTRKALNRLIMAQDTGSAIKGAVRVDYFWGYGDEAGELAGK
                  370 380 390 400 410 420
                  430 440
m919.pep QKTTGYVWQLLPNGMKPEYRPX
            ||||||||||||||||||||||
a919 QKTTGYVWQLLPNGMKPEYRPX
                  430 440
121 and 121-1
```

[0318] The following partial DNA sequence was identified in N. meningitidis <SEQ ID 40>:

```
m121.seq
      1 ATGGAAACAC AGCTTTACAT CGGCATCATG TCGGGAACCA GCATGGACGG
    51 GGCGGATGCC GTACTGATAC GGATGGACGG CGGCAAATGG CTGGGCGCGG
  101 AAGGGCACGC CTTTACCCCC TACCCCGGCA GGTTACGCCG CCAATTGCTG
  151 GATTTGCAGG ACACAGGCGC AGACGAACTG CACCGCAGCA GGATTTTGTC
  201 GCAAGAACTC AGCCGCCTAT ATGCGCAAAC CGCCGCCGAA CTGCTGTGCA
  251 GTCAAAACCT CGCACCGTCC GACATTACCG CCCTCGGCTG CCACGGGCAA
  301 ACCGTCCGAC ACGCGCCGGA ACACGGTTAC AGCATACAGC TTGCCGATTT
  351 GCCGCTGCTG GCGxxxxxxx xxxxxxxxxx xxxxxxxxxx xxxxxxxxxx
  401 xxxxxxxxxx xxxxxxxxxx xxxxxxxxxx xxxxxxxxxx xxxxxxxxxx
  451 xxxxxxxxxx xxxxxxxxxx xxxxxxxxxx xxxxxxxxxx xxxxxxxxxx
  501 xxxxxxxxxx xxxxxxxxxx xxxxxxxxxx xxxxxxxxxx xxxxxxxxxx
  551 xxxxxxxxxx xxxxxxxxxx xxxxxxxxxx xxxxxxxxxx xxxxxxxxxx
  601 xxxxxxCAGC TTCCTTACGA CAAAAACGGT GCAAAGTCGG CACAAGGCAA
  651 CATATTGCCG CAACTGCTCG ACAGGCTGCT CGCCCACCCG TATTTCGCAC
  701 AACGCCACCC TAAAAGCACG GGGCGCGAAC TGTTTGCCAT AAATTGGCTC
  751 GAAACCTACC TTGACGGCGG CGAAAACCGA TACGACGTAT TGCGGACGCT
  801 TTCCCGTTTT ACCGCGCAAA CCGTTTGCGA CGCCGTCTCA CAGGCAGCGG
  851 CAGATGCCCG TCAAATGTAC ATTTGCGACG GCGGCATCCG CAATCCTGTT
  901 TTAATGGCGG ATTTGGCAGA ATGTTTCGGC ACACGCGTTT CCCTGCACAG
  951 CACCGCCGAC CTGAACCTCG ATCCGCAATG GGTGGAAGCC GCCGnATTTG
1001 CGTGGTTGGC GGCGTGTTGG ATTAATCGCA TTCCCGGTAG TCCGCACAAA
1051 GCAACCGGCG CATCCAAACC GTGTATTCTG AnCGCGGGAT ATTATTATTG
1101 A
```

[0319] This corresponds to the amino acid sequence <SEQ ID 41; ORF 121>:

```
m121.pep
    1 METQLYIGIM SGTSMDGADA VLIRMDGGKW LGAEGHAFTP YPGRLRRQLL
  51 DLQDTGADEL HRSRILSQEL SRLYAQTAAE LLCSQNLAPS DITALGCHGQ
101 TVRHAPEHGY SIQLADLPLL Axxxxxxxxx xxxxxxxxxx xxxxxxxxxx
151 xxxxxxxxxx xxxxxxxxxx xxxxxxxxxx xxxxxxxxxx xxxxxxxxxx
201 xxQLPYDKNG AKSAQGNILP QLLDRLLAHP YFAQRHPKST GRELFAINWL
251 ETYLDGGENR YDVLRTLSRF TAQTVCDAVS HAAADARQMY ICDGGIRNPV
301 LMADLAECFG TRVSLHSTAD LNLDPQWVEA AXFAWLAACW INRIPGSPHK
351 ATGASKPCIL XAGYYY*
```

[0320] The following partial DNA sequence was identified in N. gonorrhoeae <SEQ ID 42>:

```
g121.seq
      1 ATGGAAACAC AGCTTTACAT CGGCATTATG TCGGGAACCA GTATGGACGG
    51 GGCGGATGCC GTGCTGGTAC GGATGGACGG CGGCAAATGG CTGGGCGCGG
  101 AAGGGCACGC CTTTACCCCC TACCCTGACC GGTTGCGCCG CAAATTGCTG
  151 GATTTGCAGG ACACAGGCAC AGACGAACTG CACCGCAGCA GGATGTTGTC
  201 GCAAGAACTC AGCCGCCTGT ACGCGCAAAC CGCCGCCGAA CTGCTGTGCA
  251 GTCAAAACCT CGCTCCGTGC GACATTACCG CCCTCGGCTG CCACGGGCAA
  301 ACCGTCCGAC ACGCGCCGGA ACACGGTtac AGCATACAGC TTGCCGATTT
  351 GCCGCTGCTG GCGGAACTGa cgcggatttT TACCGTCggc gacttcCGCA
  401 GCCGCGACCT TGCTGCCGGC GGacaAGGTG CGCCGCTCGT CCCCGCCTTT
  451 CACGAAGCCC TGTTCCGCGA TGACAGGGAA ACACGCGTGG TACTGAACAT
  501 CGGCGGGATT GCCAACATCA GCGTACTCCC CCCCGGCGCA CCCGCCTTCG
  551 GCTTCGACAC AGGGCCGGGC AATATGCTGA TGGAcgcgtg gacgcaggca
  601 cacTGGcagc TGCCTTACGA CAAAAacggt gcAAAGgcgg cacAAGGCAA
  651 catatTGCcg cAACTGCTCG gcaggctGCT CGCCcaccCG TATTTCTCAC
  701 AACCCcaccc aaAAAGCACG GGgcGCGaac TgtttgcccT AAattggctc
  751 gaaacctAcc ttgacggcgg cgaaaaccga tacgacgtat tgcggacgct
  801 ttcccgattc accgcgcaaA ccgTttggga cgccgtctca CACGCAGCGG
  851 CAGATGCCCG TCAAATGTAC ATTTGCGGCG GCGGCATCCG CAATCCTGTT
  901 TTAATGGCGG ATTTGGCAGA ATGTTTCGGC ACACGCGTTT CCCTGCACAG
  951 CACCGCCGAA CTGAACCTCG ATCCTCAATG GGTGGAGGCG gccgCATTtg
1001 cgtggttggC GGCGTGTTGG ATTAACCGCA TTCCCGGTAG TCCGCACAAA
1051 GCGACCGGCG CATCCAAACC GTGTATTCTG GGCGCGGGAT ATTATTATTG
1101 A
```

[0321] This corresponds to the amino acid sequence <SEQ ID 43; ORF 121.ng>:

```
g121.pep
    1 METQLYIGIM SGTSMDGADA VLVRMDGGKW LGAEGHAFTP YPDRLRRKLL
  51 DLQDTGTDEL HRSRMLSQEL SRLYAQTAAE LLCSQNLAPC DITALGCHGQ
101 TVRHAPEHGY SIQLADLPLL AELTRIFTVG DFRSRDLAAG GQGAPLVPAF
151 HEALFRDDRE TRVVLNIGGI ANISVLPPGA PAFGFDTGPG NMLMDAWTQA
201 HWQLPYDKNG AKAAQGNILP QLLGRLLAHP YFSQPHPKST GRELFALNWL
251 ETYLDGGENR YDVLRTLSRF TAQTVWDAVS HAAADARQMY ICGGGIRNPV
301 LMADLAECFG TRVSLHSTAE LNLDPQWVEA AAFAWLAACW INRIPGSPHK
351 ATGASKPCIL GAGYYY*
```

[0322] ORF 121 shows 73.5% identity over a 366 aa overlap with a predicted ORF (ORF121.ng) from N. gonorrhoeae:

```
m121/g121
                  10 20 30 40 50 60
m121.pep METQLYIGIMSGTSMDGADAVLIRMDGGKWLGAEGHAFTPYPGRLRRQLLDLQDTGADEL
            ||||||||||||||||||||||:||||||||||||||||||| ||||:||||||||:|||
g121 METQLYIGIMSGTSMDGADAVLVRMDGGKWLGAEGHAFTPYPDRLRRKLLDLQDTGTDEL
                  10 20 30 40 50 60
                  70 80 90 100 110 120
m121.pep HRSRILSQELSRLYAQTAAELLCSQNLAPSDITALGCHGQTVRHAPEHGYSIQLADLPLL
            ||||:|||||||||||||||||||||||| ||||||||||||||||||||||||||||||
g121 HRSRMLSQELSRLYAQTAAELLCSQNLAPCDITALGCHGQTVRHAPEHGYSIQLADLPLL
                  70 80 90 100 110 120
                    130 140 150 160 170 180
m121.pep AXXXXXXXXXXXXXXXXXXXXXXXXXXXXXXXXXXXXXXXXXXXXXXXXXXXXXXXXXXX
            | : : :
g121 AELTRIFTVGDFRSRDLAAGGQGAPLVPAFHEALFRDDRETRVVLNIGGIANISVLPPGA
                    130 140 150 160 170 180
                    190 200 210 220 230 240
m121.pep XXXXXXXXXXXXXXXXXXXXXXQLPYDKNGAKSAQGNILPQLLDRLLAHPYFAQRHPKST
                : : ||||||||||:|||||||||| ||||||||:| |||||
g121 PAFGFDTGPGNMLMDAWTQAHWQLPYDKNGAKAAQGNILPQLLGRLLAHPYFSQPHPKST
                    190 200 210 220 230 240
                  250 260 270 280 290 300
m121.pep GRELFAINWLETYLDGGENRYDVLRTLSRFTAQTVCDAVSHAAADARQMYICDGGIRNPV
            ||||||:|||||||||||||||||||||||||||| |||||||||||||||| |||||||
g121 GRELFALNWLETYLDGGENRYDVLRTLSRFTAQTVWDAVSHAAADARQMYICGGGIRNPV
                  250 260 270 280 290 300
                  310 320 330 340 350 360
m121.pep LMADLAECFGTRVSLHSTADLNLDPQWVEAAXFAWLAACWINRIPGSPHKATGASKPCIL
            |||||||||||||||||||:||||||||||| ||||||||||||||||||||||||||||
g121 LMADLAECFGTRVSLHSTAELNLDPQWVEAAAFAWLAACWINRIPGSPHKATGASKPCIL
                  310 320 330 340 350 360
m121.pep XAGYYYX
            ||||||
g121 GAGYYYX
```

[0323] The following partial DNA sequence was identified in N. meningitidis <SEQ ID 44>:

a121.seq

| | |
|---|---|
| 1 | ATGGAAACAC AGCTTTACAT CGGCATCATG TCGGGAACCA |
| | GCATGGACGG |
| 51 | GGCGGATGCC GTACTGATAC GGATGGACGG CGGCAAATGG |
| | CTGGGCGCGG |
| 101 | AAGGGCACGC CTTTACCCCC TACCCCGGCA GGTTACGCCG |
| | CAAATTGCTG |
| 151 | GATTTGCAGG ACACAGGGGC GGACGAACTG CACCGCAGCA |
| | GGATGTTGTC |
| 201 | GCAAGAACTC AGCCGCCTGT ACGCGCAAAC CGCCGCCGAA |
| | CTGCTGTGCA |
| 251 | GTCAAAACCT CGCGCCGTCC GACATTACCG CCCTCGGCTG |
| | CCACGGGCAA |
| 301 | ACCGTCAGAC ACGCGCCGGA ACACAGTTAG AGCGTACAGC |
| | TTGCCGATTT |
| 351 | GCCGCTGCTG GGGGAACGGA CTCAGATTTT TACCGTCGGC |
| | GACTTGCGCA |
| 401 | GCCGCGACCT TGCGGCCGGC GGACAAGGGG GGCCGCTCGT |
| | CCCCGCGTTT |
| 451 | CAGGAAGCGG TGTTGCGGGA CGACAGGGAA AGACGCGCGG |
| | TACTGAACAT |
| 501 | CGGCGGGATT GCCAACATCA GCGTACTCCC CCCCGACGCA |
| | CCCGCCTTCG |
| 551 | GCTTCGACAC AGGACCGGGC AATATGCTGA TGGACGCGTG |
| | GATGCAGGCA |
| 601 | CACTGGCAGC TTCCTTACGA CAAAAACGGT GCAAAGGCGG |
| | CACAAGGCAA |
| 651 | CATATTGCCG CAAGTGCTCG ACAGGCTGCT CGGCCACCCG |
| | TATTTCGCAC |
| 701 | AACCCCACCC TAAAAGCACG GGGCGGGAAC TGTTTGCCCT |
| | AAATTGGCTC |
| 751 | GAAACCTACC TTGACGGCGG CGAAAACCGA TACGACGTAT |
| | TGCGGACGCT |
| 801 | TTCCCGATTC ACCGCGCAAA CCGTTTTCGA CGGCGTCTCA |
| | CACGCAGCGG |
| 851 | CAGATGCCCG TCAAATGTAC ATTTGCGGCG GCGGCATCCG |
| | CAATCCTGTT |
| 901 | TTAATGGCGG ATTTGGCAGA ATGTTTCGGC ACACGCGTTT |
| | CCCTGCACAG |
| 951 | CACCGCCGAA CTGAACCTCG ATCCGCAATG GGTAGAAGCC |
| | GCCGCGTTCG |
| 1001 | CATGGATGGC GGCGTGTTGG GTCAACCGGA TTCCCGGTAG |
| | TCCGCACAAA |
| 1051 | GCAACCGGGG CATCCAAACC GTGTATTCTG GGCGCGGGAT |
| | ATTATTATTG |
| 1101 | A |

[0324] This corresponds to the amino acid sequence <SEQ ID 45; ORF 121.a>:

| a121.pep | | |
|---|---|---|
| | 1 | METQLYIGIM SGTSMDGADA VLIRMDGGKW LGAEGHAFTP YPGRLRRKLL |
| | 51 | DLQDTGADEL HRSRMLSQEL SRLYAQTAAE LLCSQNLAPS DITALGCHGQ |
| | 101 | TVRHAPEHSY SVQLADLPLL AERTQIFTVG DFRSRDLAAG GQGAPLVPAF |
| | 151 | HEALFRDDRE TRAVLNIGGI ANISVLPPDA PAFGFDTGPG NMLMDAWMQA |
| | 201 | HWQLPYDKNG AKAAQGNILP QLLDRLLAHP YFAQPHPKST GRELFALNWL |
| | 251 | ETYLDGGENR YDVLRTLSRF TAQTVFDAVS HAAADARQMY ICGGGIRNPV |
| | 301 | LMADLAECFG TRVSLHSTAE LNLDPQWVEA AAFAWMAACW VNRIPGSPHK |
| | 351 | ATGASKPCIL GAGYYY* |

| | |
|---|---|
| m121/a121 | ORFs 121 and 121.a 74.0% identity in 366 aa overlap |
| | 10 20 30 40 50 60 |
| m121.pep | METQLYIGIMSGTSMDGADAVLIRMDGGKWLGAEGHAFTPYPGRLRRQLLDLQDTGADEL |
| | \|\|\|\|\|\|\|\|\|\|\|\|\|\|\|\|\|\|\|\|\|\|\|\|\|\|\|\|\|\|\|\|\|\|\|\|\|\|\|\|\|\|\|\|\|\|\|:\|\|\|\|\|\|\|\|\|\|\|\| |
| a121 | METQLYIGIMSGTSMDGADAVLIRMDGGKWLGAEGHAFTPYPGRLRRKLLDLQDTGADEL |
| | 10 20 30 40 50 60 |
| | 70 80 90 100 110 120 |
| m121.pep | HRSRILSQELSRLYAQTAAELLCSQNLAPSDITALGCHGQTVRHAPEHGYSIQLADLPLL |
| | \|\|\|\|:\|\|\|\|\|\|\|\|\|\|\|\|\|\|\|\|\|\|\|\|\|\|\|\|\|\|\|\|\|\|\|\|\|\|\|\|\|\|\|\|\|\|:\|\|:\|\|\|\|\|\|\|\| |
| a121 | HRSRMLSQELSRLYAQTAAELLCSQNLAPSDITALGCHGQTVRHAPEHSYSVQLADLPLL |
| | 70 80 90 100 110 120 |
| | 130 140 150 160 170 180 |
| m121.pep | AXXXXXXXXXXXXXXXXXXXXXXXXXXXXXXXXXXXXXXXXXXXXXXXXXXXXXXXXXXX |
| | \| : : : |
| a121 | AERTQIFTVGDFRSRDLAAGGQGAPLVPAFHEALFRDDRETRAVLNIGGIANISVLPPDA |
| | 130 140 150 160 170 180 |
| | 190 200 210 220 230 240 |
| m121.pep | XXXXXXXXXXXXXXXXXXXXXQLPYDKNGAKSAQGNILPQLLDRLLAHPYFAQRHPKST |
| | : \|\|\|\|\|\|\|\|\|\|:\|\|\|\|\|\|\|\|\|\|\|\|\|\|\|\|\|\|\|\|\| \|\|\|\|\| |
| a121 | PAFGFDTGPGNMLMDAWMQAHWQLPYDKNGAKAAQGNILPQLLDRLLAHPYFAQPHPKST |
| | 190 200 210 220 230 240 |
| | 250 260 270 280 290 300 |
| m121.pep | GRELFAINWLETYLDGGENRYDVLRThSRFTAQTVCDAVSHAAADARQMYICDGGIRNPV |
| | \|\|\|\|\|\|:\|\|\|\|\|\|\|\|\|\|\|\|\|\|\|\|\|\|\|\|\|\|\|\|\|\|\|\| \|\|\|\|\|\|\|\|\|\|\|\|\|\|\|\| \|\|\|\|\|\|\| |
| a121 | GRELFALNWLETYLDGGENRYDVLRTLSRFTAQTVFDAVSHAAADARQMYICGGGIRNPV |
| | 250 260 270 280 290 300 |
| | 310 320 330 340 350 360 |
| m121.pep | LMADLAECFGTRVSLHSTADLNLDPQWVEAAXFAWLAACWINRIPGSPHKATGASKPCIL |
| | \|\|\|\|\|\|\|\|\|\|\|\|\|\|\|\|\|\|\|:\|\|\|\|\|\|\|\|\|\|\| \|\|\|:\|\|\|\|:\|\|\|\|\|\|\|\|\|\|\|\|\|\|\|\|\|\|\| |
| a121 | LMADLAECFGTRVSLHSTAELNLDPQWVEAAAFAWMAACWVNRIPGSPHKATGASKPCIL |
| | 310 320 330 340 350 360 |
| m121.pep | XAGYYYX |
| | \|\|\|\|\|\| |
| a121 | GAGYYYX |

[0325] Further work revealed the DNA sequence identified in N. meningitidis <SEQ ID 46>:

m121-1.seq

| | |
|---|---|
| 1 | ATGGAAAGAC AGCTTTACAT CGGCATCATG TCGGGAACCA |
| | GCATGGACGG |
| 51 | GGCGGATGGC GTACTGATAC GGATGGACGG CGGCAAATGG |
| | CTGGGCGCGG |
| 101 | AAGGGCAGGC CTTTACCCCC TACGCGGGCA GGTTACGCCG |
| | CCAATTGCTG |
| 151 | GATTTGGAGG ACACAGGCGC AGACGAACTG CACCGCAGCA |
| | GGATTTTGTC |
| 201 | GCAAGAACTC AGCCGCCTAT ATGCGCAAAC CGCCGCCGAA |
| | CTGCTGTGCA |
| 251 | GTCAAAACCT GGCACCGTCC GACATTACCG CCCTCGGCTG |
| | CCACGGGGAA |
| 301 | ACCGTCCGAC ACGCGCCGGA ACACGGTTAC AGCATACAGC |
| | TTGCCGATTT |
| 351 | GCCGCTGCTG GCGGAACGGA CGCGGATTTT TACCGTCGGC |
| | GACTTCCGCA |
| 401 | GCCGCGACCT TGCGGCCGGC GGACAAGGCG CGCCACTCGT |
| | CCCCGCCTTT |
| 451 | CACGAAGCCC TGTTCCGCGA CAACAGGGAA ACACGGGCGG |
| | TACTGAACAT |
| 501 | CGGCGGGATT GCCAACATCA GCGTACTCCC CCCCGACGCA |
| | CCCGCCTTCG |
| 551 | GCTTCGACAC AGGGCCGGGC AATATGCTGA TGGACGCGTG |
| | GACGCAGGCA |
| 601 | CACTGGCAGC TTCCTTACGA CAAAAACGGT GCAAAGGCGG |
| | CACAAGGCAA |
| 651 | CATATTGCCG CAACTGCTCG ACAGGCTGCT CGCCCACCCG |
| | TATTTCGCAC |
| 701 | AACCCCACCC TAAAAGCACG GGGCGCGAAC TGTTTGCCCT |
| | AAATTGGCTC |
| 751 | GAAACCTACC TTGACGGCGG CGAAAACCGA TACGACGTAT |
| | TGCGGACGCT |
| 801 | TTCCCGTTTT ACCGCGCAAA CCGTTTGCGA CGCCGTCTCA |
| | CACGCAGCGG |
| 851 | CAGATGCCCG TCAAATGTAC ATTTGCGGCG GCGGGATCCG |
| | CAATCCTGTT |
| 901 | TTAATGGCGG ATTTGGCAGA ATGTTTCGGC ACACGCGTTT |
| | CCCTGCACAG |
| 951 | CACCGCCGAC CTGAACCTCG ATCCGCAATG GGTGGAAGCC |
| | GCCGNATTTG |
| 1001 | CGTGGTTGGC GGCGTGTTGG ATTAATCGCA TTCCCGGTAG |
| | TCCGCACAAA |
| 1051 | GCAACCGGCG CATCCAAACC GTGTATTCTG ANCGCGGGAT |
| | ATTATTATTG |
| 1101 | A |

[0326] This corresponds to the amino acid sequence <SEQ ID 47; ORF 121-1>:

| m121-1.pep | | |
|---|---|---|
| | 1 | METQLYIGIM SGTSMDGADA VLIRMDGGKW LGAEGHAFTP YPGRLRRQLL |
| | 51 | DLQDTGADEL HRSRILSQEL SRLYAQTAAE LLCSQNLAPS DITALGCHGQ |
| | 101 | TVRHAPEHGY SIQLADLPLL AERTRIFTVG DFRSRDLAAG GQGAPLVPAF |
| | 151 | HEALFRDNRE TRAVLNIGGI ANISVLPPDA PAFGFDTGPG NMLMDAWTQA |
| | 201 | HWQLPYDKNG AKAAQGNILP QLLDRLLAHP YFAQPHPKST GRELFALNWL |
| | 251 | ETYLDGGENR YDVLRTLSRF TAQTVCDAVS HAAADARQMY ICGGGIRNPV |
| | 301 | LMADLAECFG TRVSLHSTAD LNLDPQWVEA AXFAWLAACW INRIPGSPHK |
| | 351 | ATGASKPCIL XAGYYY* |

| | |
|---|---|
| m121-1/g121 | ORFs 121-1 and 121-1.ng showed a 95.6% identity in 366 aa overlap |
| | 10 20 30 40 50 60 |
| m121-1.pep | METQLYIGIMSGTSMDGADAVLIRMDGGKWLGAEGHAFTPYPGRLRRQLLDLQDTGADEL |
| | \|\|\|\|\|\|\|\|\|\|\|\|\|\|\|\|\|\|\|\|\|\|:\|\|\|\|\|\|\|\|\|\|\|\|\|\|\|\|\|\|\| \|\|\|\|:\|\|\|\|\|\|\|\|:\|\|\| |
| g121 | METQLYIGIMSGTSMDGADAVLVRMDGGKWLGAEGHAFTPYPDRLRRKLLDLQDTGTDEL |
| | 10 20 30 40 50 60 |
| | 70 80 90 100 110 120 |
| m121-1.pep | HRSRILSQELSRLYAQTAAELLGSQNLAPSDITALGCHGQTVRHAPEHGYSIQLADLPLL |
| | \|\|\|\|:\|\|\|\|\|\|\|\|\|\|\|\|\|\|\|\|\|\|\|\|\|\|\|\| \|\|\|\|\|\|\|\|\|\|\|\|\|\|\|\|\|\|\|\|\|\|\|\|\|\|\|\|\|\| |
| g121 | HRSRMLSQELSRLYAQTAAELLCSQNLAPCDITALGCHGQTVRHAPEHGYSIQLADLPLL |
| | 70 80 90 100 110 120 |
| | 130 140 150 160 170 180 |
| m121-1.pep | AERTRIFTVGDFRSRDLAAGGQGAPLVPAFHEALFRDNRETRAVLNIGGIANISVLPPDA |
| | \|\| \|\|\|\|\|\|\|\|\|\|\|\|\|\|\|\|\|\|\|\|\|\|\|\|\|\|\|\|\|\|\|\|\|\|:\|\|\|\|:\|\|\|\|\|\|\|\|\|\|\|\|\|\|\| \| |
| g121 | AELTRIFTVGDFRSRDLAAGGQGAPLVPAFHEALFRDDRETRVVLNIGGIANISVLPPGA |
| | 130 140 150 160 170 180 |
| | 190 200 210 220 230 240 |
| m121-1.pep | PAFGFDTGPGNMLMDAWTQAHWQLPYDKNGAKAAQGNILPQLLDRLLAHPYFAQPHPKST |
| | \|\|\|\|\|\|\|\|\|\|\|\|\|\|\|\|\|\|\|\|\|\|\|\|\|\|\|\|\|\|\|\|\|\|\|\|\|\|\|\|\|\|\| \|\|\|\|\|\|\|\|:\|\|\|\|\|\|\| |
| g121 | PAFGFDTGPGNMLMDAWTQAHWQLPYDKNGAKAAQGNILPQLLGRLLAHPYFSQPHPKST |
| | 190 200 210 220 230 240 |
| | 250 260 270 280 290 300 |
| m121-1.pep | GRELFALNWLETYLDGGENRYDVLRTLSRFTAQTVCDAVSHAAADARQMYICGGGIRNPV |
| | \|\|\|\|\|\|\|\|\|\|\|\|\|\|\|\|\|\|\|\|\|\|\|\|\|\|\|\|\|\|\|\|\|\|\| \|\|\|\|\|\|\|\|\|\|\|\|\|\|\|\|\|\|\|\|\|\|\|\| |
| g121 | GRELFALNWLETYLDGGENRYDVLRTLSRFTAQTVWDAVSHAAADARQMYICGGGIRNPV |
| | 250 260 270 280 290 300 |
| | 310 320 330 340 350 360 |
| m121-1.pep | LMADLAECFGTRVSLHSTADLNLDPQWVEAAXFAWLAACWINRIPGSPHKATGASKPCIL |
| | \|\|\|\|\|\|\|\|\|\|\|\|\|\|\|\|\|\|\|:\|\|\|\|\|\|\|\|\|\|\| \|\|\|\|\|\|\|\|\|\|\|\|\|\|\|\|\|\|\|\|\|\|\|\|\|\|\|\| |
| g121 | LMADLAECFGTRVSLHSTAELNLDPQWVEAAAFAWLAACWINRIPGSPHKATGASKPCIL |
| | 310 320 330 340 350 360 |
| m121-1.pep | XAGYYYX |
| | \|\|\|\|\|\| |
| g121 | GAGYYYX |

[0327] The following partial DNA sequence was identified in N. meningitidis <SEQ ID 48>:

a121-1.seq

| | |
|---|---|
| 1 | ATGGAAACAC AGCTTTACAT CGGCATCATG TCGGGAACCA |
| | GCATGGACGG |
| 51 | GGGGGATGCC GTACTGATAC GGATGGACGG CGGCAAATGG |
| | CTGGGCGCGG |
| 101 | AAGGGCACGC CTTTACCCCC TACCCCGGCA GGTTACGCCG |
| | CAAATTGCTG |
| 151 | GATTTGCAGG ACACAGGCGC GGACGAACTG CACCGCAGCA |
| | GGATGTTGTC |
| 201 | GCAAGAACTC AGCCGCCTGT ACGCGCAAAC CGCCGCCGAA |
| | CTGCTGTGCA |
| 251 | GTCAAAACCT CGCGCCGTCC GACATTACCG CCCTCGGCTG |
| | CCACGGGCAA |
| 301 | ACCGTCAGAC ACGCGCCGGA ACACAGTTAC AGCGTACAGC |
| | TTGCCGATTT |
| 351 | GCCGCTGCTG GCGGAACGGA CTCAGATTTT TACCGTCGGC |
| | GACTTCCGCA |
| 401 | GCCGCGACCT TGCGGCCGGC GGACAAGGCG CGCCGCTCGT |
| | CCCCGCCTTT |
| 451 | CACGAAGCCC TGTTCCGCGA CGACAGGGAA ACACGCGCGG |
| | TACTGAACAT |
| 501 | CGGCGGGATT GCCAACATCA GCGTACTCCC CCCCGACGCA |
| | CCCGCCTTCG |
| 551 | GCTTCGACAC AGGACCGGGC AATATGCTGA TGGACGCGTG |
| | GATGCAGGCA |
| 601 | CACTGGCAGC TTCCTTAGGA CAAAAACGGT GCAAAGGCGG |
| | CACAAGGCAA |
| 651 | CATATTGCCG CAACTGCTCG ACAGGCTGCT CGCCCACCCG |
| | TATTTCGCAC |
| 701 | AACCCCACCC TAAAAGCACG GGGCGCGAAC TGTTTGCCCT |
| | AAATTGGCTC |
| 751 | GAAACCTACC TTGACGGCGG CGAAAACCGA TACGACGTAT |
| | TGCGGACGCT |
| 801 | TTCCCGATTC ACCGCGCAAA CCGTTTTCGA CGCCGTCTCA |
| | CACGCAGCGG |
| 851 | CAGATGCCCG TCAAATGTAC ATTTGCGGCG GCGGCATCCG |
| | CAATCCTGTT |
| 901 | TTAATGGCGG ATTTGGCAGA ATGTTTCGGC ACACGCGTTT |
| | CCCTGCACAG |
| 951 | GAGGGCGGAA CTGAACGTCG ATCCGCAATG GGTAGAAGCC |
| | GCCGCGTTCG |
| 1001 | CATGGATGGC GGCGTGTTGG GTCAACCGGA TTCCCGGTAG |
| | TCCGCACAAA |
| 1051 | GCAAGCGGCG CATCCAAACC GTGTATTCTG GGCGCGGGAT |
| | ATTATTATTG |
| 1101 | A |

[0328] This corresponds to the amino acid sequence <SEQ ID 49; ORF 121-1.a>:

| a121-1.pep | | |
|---|---|---|
| | 1 | METQLYIGIM SGTSMDGADA VLIRMDGGKW LGAEGHAFTP YPGRLRRKLL |
| | 51 | DLQDTGADEL HRSRMLSQEL SRLYAQTAAE LLCSQNLAPS DITALGCHGQ |
| | 101 | TVRHAPEHSY SVQLADLPLL AERTQIFTVG DFRSRDLAAG GQGAPLVPAF |
| | 151 | HEALFRDDRE TRAVLNIGGI ANISVLPPDA PAFGFDTGPG NMLMDAWMQA |
| | 201 | HWQLPYDKNG AKAAQGNILP QLLDRLLAHP YFAQPHPKST GRELFALNWL |
| | 251 | ETYLDGGENR YDVLRTLSRF TAQTVFDAVS HAAADARQMY ICGGGIRNPV |
| | 301 | LMADLAECFG TRVSLHSTAE LNLDPQWVEA AAFAWMAACW VNRIPGSPHK |
| | 351 | ATGASKPCIL GAGYYY* |

| | |
|---|---|
| m121-1/a121-1 | ORFs 121-1 and 121-1.a showed a 96.4% identity in 366 aa overlap |
| | 10 20 30 40 50 60 |
| m121-1.pep | METQLYIGIMSGTSMDGADAVLIRMDGGKWLGAEGHAFTPYPGRLRRQLLDLQDTGADEL |
| | \|\|\|\|\|\|\|\|\|\|\|\|\|\|\|\|\|\|\|\|\|\|\|\|\|\|\|\|\|\|\|\|\|\|\|\|\|\|\|\|\|\|\|\|\|\|\|:\|\|\|\|\|\|\|\|\|\|\|\| |
| a121-1 | METQLYIGIMSGTSMDGADAVLIRMDGGKWLGAEGHAFTPYPGRLRRKLLDLQDTGADEL |
| | 10 20 30 40 50 60 |
| | 70 80 90 100 110 120 |
| m121-1.pep | HRSRILSQELSRLYAQTAAELLCSQNLAPSDITALGCHGQTVRHAPEHGYSIQLADLPLL |
| | \|\|\|\|:\|\|\|\|\|\|\|\|\|\|\|\|\|\|\|\|\|\|\|\|\|\|\|\|\|\|\|\|\|\|\|\|\|\|\|\|\|\|\|\|\|\|\|:\|\|:\|\|\|\|\|\|\|\| |
| a121-1 | HRSRMLSQELSRLYAQTAAELLCSQNLAPSDITALGCHGQTVRHAPEHSYSVQLADLPLL |
| | 70 80 90 100 110 120 |
| | 130 140 150 160 170 180 |
| m121-1.pep | AERTRIFTVGDFRSRDLAAGGQGAPLVPAFHEALFRDNRETRAVLNIGGIANISVLPPDA |
| | \|\|\|\|:\|\|\|\|\|\|\|\|\|\|\|\|\|\|\|\|\|\|\|\|\|\|\|\|\|\|\|\|\|\|\|\|:\|\|\|\|\|\|\|\|\|\|\|\|\|\|\|\|\|\|\|\|\|\| |
| a121-1 | AERTQIFTVGDFRSRDLAAGGQGAPLVPAFHEALFRDDRETRAVLNIGGIANISVLPPDA |
| | 130 140 150 160 170 180 |
| | 190 200 210 220 230 240 |
| m121-1.pep | PAFGFDTGPGNMLMDAWTQAHWQLPYDKNGAKAAQGNILPQLLDRLLAHPYFAQPHPKST |
| | \|\|\|\|\|\|\|\|\|\|\|\|\|\|\|\|\| \|\|\|\|\|\|\|\|\|\|\|\|\|\|\|\|\|\|\|\|\|\|\|\|\|\|\|\|\|\|\|\|\|\|\|\|\|\|\|\|\|\| |
| a121-1 | PAFGFDTGPGNMLMDAWMQAHWQLPYDKNGAKAAQGNILPQLLDRLLAHPYFAQPHPKST |
| | 190 200 210 220 230 240 |
| | 250 260 270 280 290 300 |
| m121-1.pep | GRELFALNWLETYLDGGENRYDVLRTLSRFTAQTVCDAVSHAAADARQMYICGGGIRNPV |
| | \|\|\|\|\|\|\|\|\|\|\|\|\|\|\|\|\|\|\|\|\|\|\|\|\|\|\|\|\|\|\|\|\|\|\| \|\|\|\|\|\|\|\|\|\|\|\|\|\|\|\|\|\|\|\|\|\|\|\| |
| a121-1 | GRELFALNWLETYLDGGENRYDVLRTLSRFTAQTVFDAVSHAAADARQMYICGGGIRNPV |
| | 250 260 270 280 290 300 |
| | 310 320 330 340 350 360 |
| m121-1.pep | LMADLAECFGTRVSLHSTADLNLDPQWVEAAXFAWLAACWINRIPGSPHKATGASKPCIL |
| | \|\|\|\|\|\|\|\|\|\|\|\|\|\|\|\|\|\|\|:\|\|\|\|\|\|\|\|\|\|\| \|\|\|:\|\|\|\|:\|\|\|\|\|\|\|\|\|\|\|\|\|\|\|\|\|\|\| |
| a121 | LMADLAECFGTRVSLHSTAELNLDPQWVEAAAFAWMAACWVNRIPGSPHKATGASKPCIL |
| | 310 320 330 340 350 360 |
| m121-1.pep | XAGYYYX |
| | \|\|\|\|\|\| |
| a121 | GAGYYYX |
| 128 and 128-1 | |

[0329] The following partial DNA sequence was identified in N. meningitidis <SEQ ID 50>:

m128.seq (partial)

| | |
|---|---|
| 1 | ATGACTGACA ACGCACTGCT CCATTTGGGC GAAGAACCCC |
| | GTTTTGATCA |
| 51 | AATCAAAACC GAAGACATCA AACCCGCCCT GCAAACCGCC |
| | ATCGCCGAAG |
| 101 | CGCGGGAACA AATCGCCGCC ATCAAAGCCC AAACGCACAC |
| | CGGGTGGGCA |
| 151 | AACACTGTCG AACCCCTGAC CGGCATCAGC GAACGCGTCG |
| | GCAGGATTTG |
| 201 | GGGCGTGGTG TCGCACCTCA ACTGCGTCGC CGACACGCCC |
| | GAACTGCGCG |
| 251 | CCGTCTATAA CGAACTGATG GCCGAAATCA CCGTCTTCTT |
| | CACCGAAATC |
| 301 | GGACAAGACA TCGAGCTGTA CAACCGCTTC AAAACCATCA |
| | AAAATTCCCC |
| 351 | CGAATTCGAC ACCCTCTCCC CCGCACAAAA AACCAAACTC |
| | AACCAC |
| 1 | TACGCCAGCG AAAAACTGCG CGAAGCCAAA TACGCGTTCA |
| | GGGAAACGGA |
| 51 | wGTCAAAAAA TAyTTCCCyG TCGGCAAwGT ATTAAACGGA |
| | CTGTTCGCCC |
| 101 | AAmTCAAAAA AGTmTAGGGG ATCGGATTTA CCGAAAAAAC |
| | yGTCCCCGTC |
| 151 | TGGGACAAAG ACGTGGGCTA TTkTGAATTG CAACAAAACG |
| | GCGAAmCCAT |
| 201 | AGGCGGCGTT TATATGGATT TGTACGCACG CGAAGGGAAA |
| | CGCGGCGGCG |
| 251 | CGTGGATGAA CGACTACAAA GGCCGCCGCC GTTTTTCAGA |
| | CGGCACGCTG |
| 301 | CAAyTGCCCA CCGCCTACCT CGTCTGCAAC TTCGCGCCAC |
| | CCGTCGGCGG |
| 351 | CAGGGAAGCC CGCyTGAGCC ACGACGAAAT CCTCATCCTC |
| | TTCCACGAAA |
| 401 | CCGGACACGG GCTGCACCAC CTGCTTACCC AAGTGGACGA |
| | ACTGGGCGTA |
| 451 | TCCGGCATCA ACGGCGTAkA ATGGGACGCG GTCGAACTGC |
| | CCAGCCAGTT |
| 501 | TATGGAAAAT TTCGTTTGGG AATACAATGT CTTGGGACAA |
| | mTGTCAGCCC |
| 551 | ACGAAGAAAC CGGcgTTCCC yTGCCGAAAG AACTCTTsGA |
| | CAAAwTGCTC |
| 601 | GCCGCCAAAA ACTTCCAAsG CGGCATGTTC yTsGTCCGGC |
| | AAwTGGAGTT |
| 651 | CGCCCTCTTT GATATGATGA TTTACAGCGA AGACGACGAA |
| | GGCCGTCTGA |
| 701 | AAAACTGGCA ACAGGTTTTA GACAGGGTGC GCAAAAAAGT |
| | CGCCGTCATC |
| 751 | CAGCCGCCCG AATACAACCG CTTCGGCTTG AGCTTCGGCC |
| | ACATCTTCGC |
| 801 | AGGCGGCTAT TCCGCAGCTn ATTACAGCTA CGCGTGGGCG |
| | GAAGTATTGA |
| 851 | GCGCGGACGC ATACGCCGCC TTTGAAGAAA GCGACGATGT |
| | CGCCGCCACA |
| 901 | GGCAAACGCT TTTGGCAGGA AATCCTCGCC GTCGGGGnAT |
| | CGCGCAGCGG |
| 951 | nGCAGAATCC TTCAAAGCCT TCCGCGGCCG CGAACCGAGC |
| | ATAGACGCAC |
| 1001 | TCTTGCGCCA CAGCGGTTTC GACAACGCGG TCTGA |

[0330] This corresponds to the amino acid sequence <SEQ ID 51; ORF 128>:

m128.pep (partial)

| | |
|---|---|
| 1 | MTDNALLHLG EEPRFDQIKT EDIKPALQTA IAEAREQIAA |
| | IKAQTHTGWA |
| 51 | NTVEPLTGIT ERVGRIWGVV SHLNCVADTP ELRAVYNELM |
| | PEITVFFEI |
| 101 | GQDIELYNRF KTIKNSPEFD TLSPAQKTKL NH |

//

| | |
|---|---|
| 1 | YASEKLREAK YAFSETXVKK YFPVGXVLNG LFAQXKKLYG |
| | IGFTEKTVPV |
| 51 | WHKDVRYXEL QQNGEXIGGV YMDLYAREGK RGGAWMNDYK |
| | GRRRFSDGTL |
| 101 | QLPTAYLVCN FAPPVGGREA RLSHDEILIL FHETGHGLHH |
| | LLTQVDELGV |
| 151 | SGINGVXWDA VELPSQFMEN FVWEYNVLAQ XSAHEETGVP |
| | LPKELXDKXL |
| 201 | AAKNFQXGMF XVRQXEFALF DMMIYSEDDE GRLKNWQQVL |
| | DSVRKKVAVI |
| 251 | QPPEYNRFAL SFGHIFAGGY SAAXYSYAWA EVLSADAYAA |
| | FEESDDVAAT |
| 301 | GKRFWQEILA VGXSRSGAES FKAFRGREPS IDALLRHSGF |
| | DNAV* |

[0331] The following partial DNA sequence was identified in N. gonorrhoeae <SEQ ID 52>:

g128.seq

| | |
|---|---|
| 1 | atgattgaca acgCActgct ccacttgggc gaagaaccCC |
| | GTTTTaatca |
| 51 | aatccaaacc gaagACAtca AACCCGCCGT CCAAACCGCC |
| | ATCGCCGAAG |
| 101 | CGCGCGGACA AATCGCCGCC GTCAAAGCGC AAACGCACAC |
| | CGGCTGGGCG |
| 151 | AACACCGTCG AGCGTCTGAC CGGGATCACC GAACGCGTCG |
| | GCAGGATTTG |
| 201 | GGGCGTCGTG TCCCATCTCA ACTCCGTCGT CGACACGCCC |
| | GAACTGCGCG |
| 251 | CCGTCTATAA CGAACTGATG CCTGAAATCA CCGTCTTCTT |
| | CACCGAAATC |
| 301 | GGACAAGACA TCGAACTGTA CAACCGCTTC AAAACCATCA |
| | AAAATTCCCC |
| 351 | CGAATTTGCA ACGCTTTCCC CCGCACAAAA AACCAAGCTC |
| | GATCACGACC |
| 401 | TGGGCGATTT CGTATTGAGG GGCGCGGAAC TGCCGCCCGA |
| | ACGGCAGGCA |
| 451 | GAACTGGCAA AACTGCAAAC CGAAGGCGCG CAACTTTCCG |
| | CCAAATTCTC |
| 501 | CCAAAACGTC CTAGACGCGA CCGACGCGTT CGGCATTTAC |
| | TTTGACGATG |
| 551 | CCGCACCGCT TGCCGGCATT CCCGAAGACG CGCTCGCCAT |
| | GTTTGCCGCC |
| 601 | GCCGCGCAAA GCGAAGGCAA AACAGGTTAC AAAATCGGCT |
| | TGCAGATTCC |
| 651 | GCACTACCTT GGCGTTATCC AATACGCCGG CAACCGCGAA |
| | CTGCGCGAAC |
| 701 | AAATCTACCG CGCCTACGTT ACCCGTGCCA GGGAACTTTC |
| | AAACGACGGC |
| 751 | AAATTCGACA ACACCGCCAA CATCGACCGC ACGCTCGAAA |
| | ACGCATTGAA |
| 801 | AACCGccaaa cTGCTCGGCT TTAAAAATTA CGCCGAATTG |
| | TCGCTGGCAA |
| 851 | CCAAAATGGC GGACACGCCC GAACAGGTTT TAAACTTCCT |
| | GCACGACCTC |
| 901 | GCCCGCCGCG CCAAACCCTA CGCCGAAAAA GACCTCGCCG |
| | AAGTCAAAGC |
| 951 | CTTCGCCCGC GAACACCTCG GTCTCGCCGA CCCGCAGCCG |
| | TGGGACTTGA |
| 1001 | GCTACGCCGG CGAAAAACTG CGCGAAGCCA AATACGCATT |
| | CAGCGAAACC |
| 1051 | GAAGTCAAAA AATACTTCCC CGTCGGCAAA GTTCTGGCAG |
| | GCCTGTTCGC |
| 1101 | CCAAATCAAA AAACTCTACG GCATCGGATT CGCCGAAAAA |
| | ACCGTTCCCG |
| 1151 | TCTGGCACAA AGACGTGCGC TATTTTGAAT TGCAACAAAA |
| | CGGCAAAACC |
| 1201 | ATCGGCGGGG TTTATATGGA TTTGTACGCA CGCGAAGGCA |
| | AACGCGGCGG |
| 1251 | CGCGTGGATG AACGACtaca AAGGCCGCCG CCGCTTTGCC |
| | GACGgcacGC |
| 1301 | TGCAACTGCC CACCGCCTAC CTCGTCTGCA ACTTCGCCCC |
| | GCCCGTCGGC |
| 1351 | GGCAAAGAAG CGCGTTTAAG CCACGACGAA ATGGTCACCC |
| | TCTTCCACGA |
| 1401 | AacCGGCCAC GGACTGCACC ACCTGCTTAG GCAAGTGGAC |
| | GAACTGGGCG |
| 1451 | TGTCCGGCAT CAAcggcgtA GAATGGGACG CGGTCGAACT |
| | GCCCAGCCAG |
| 1501 | TTTATGGAAA ACTTCGTTTG GGAATACAAT GTATTGGCAC |
| | AAATGTCCGC |
| 1551 | CCACGAAGAA AccgGCGAGC CCCTGCCGAA AGAACTCTTC |
| | GAGAAAATGC |
| 1601 | TcgcCGCCAA AAACTTCCAG CGCGGTATGT TCGTCGTCCG |
| | GCAAATGGAG |
| 1651 | TTGGGGCTCT TCGATATGAT GATTTACAGT GAAAGCGACG |
| | AATGGCGTCT |
| 1701 | GAAAAACTGG CAGCAGGTTT TAGACAGCGT GCGCAAAGAA |
| | GTcGCCGTCA |
| 1751 | TCCAACCGCC CGAATACAAC CGCTTCGCCA ACAGCTTCGG |
| | CCacatctTC |
| 1801 | GCcggcGGCT ATTCCGCAGG CTATTACAGC TACGCATGGG |
| | CCGAAGTCCt |
| 1851 | cAGCACCGAT GCCTACGCCG CCTTTGAAGA AAGcGACGac |
| | gtcGCCGCCA |
| 1901 | CAGGCAAACG CTTCTGGCAA GAAAtccttg ccgtcggcgg |
| | ctCCCGCAGC |
| 1951 | gcgGCGGAAT CCTTCAAAGC CTTCCGCGGA CGCGAACCGA |
| | GCATAGACGC |
| 2001 | AGTGCTGCGG CAaagcggtT TCGACAACGC gGCttgA |

[0332] This corresponds to the amino acid sequence <SEQ ID 53; ORF 128.ng>:

g128.pep

| | |
|---|---|
| 1 | MIDNALLHLG EEPRFNQIQT EDIKPAVQTA IAEARGQIAA |
| | VKAQTHTGWA |
| 51 | NTVERLTGIT ERVGRIWGVV SHLNSVVDTP ELRAVYNELM |
| | PEITVFFTEI |
| 101 | GQDIELYNRF KTIKNSPEFA TLSPAQKTKL DHDLRDFVLS |
| | GAELPPERQA |
| 151 | ELAKLQTEGA QLSAKFSQNV LDATDAFGIY FDDAAPLAGI |
| | PEDALAMFAA |
| 201 | AAQSEGKTGY KIGLQIPHYL AVIQYAGNRE LREQIYRAYV |
| | TRASELSNDG |
| 251 | KFDNTANIDR TLENALKTAK LLGFKNYAEL SLATKMADTP |
| | EQVLNFLHDL |
| 301 | ARRAKPYAEK DLAEVKAFAR EHLGLADPQP WDLSYAGEKL |
| | REAKYAFSET |
| 351 | EVKKYFPVGK VLAGLFAQIK KLYGIGFAEK TVPVWHKDVR |
| | YFELQQNGKT |
| 401 | IGGVYMDLYA REGKRGGAWM NDYKGRRRFA DGTLQLPTAY |
| | LVCNFAPPVG |
| 451 | GKEARLSHDE ILTLFHETGH GLHHLLTQVD ELGVSGINGV |
| | EWDAVELPSQ |
| 501 | FMENFVWEYN VLAQMSAHEE TGEPLPKELF DKMLAAKNFQ |
| | RGMFLVRQME |
| 551 | FALFDMMIYS ESDECRLKNW QQVLDSVRKE VAVIQPPEYN |
| | RFANSFGHIF |
| 601 | AGGYSAGYYS YAWAEVLSTD AYAAFEESDD VAATGKRFWQ |
| | EILAVGGSRS |
| 651 | AAESFKAFRG REPSIDALLR QSGFDNAA* |

[0333] ORF 128 shows 91.7% identity over a 475 aa overlap with a predicted ORF (ORF 128.ng) from N. gonorrhoeae:

| m128/g128 | |
|---|---|
| | 10 20 30 40 50 60 |
| g128.pep | MIDNALLHLGEEPRFNQIQTEDIKPAVQTAIAEARGQIAAVKAQTHTGWANTVERLTGIT |

| |||||||||||||:||:|||||||:|||||||| ||||:||||||||||||| |||||

| | |
|---|---|
| m128 | MTDNALLHLGEEPRFDQIKTEDIKPALQTAIAEAREQIAAIKAQTHTGWANTVEPLTGIT |
| | 10 20 30 40 50 60 |
| | 70 80 90 100 110 120 |
| g128.pep | ERVGRIWGVVSHLNSVVDTPELRAVYNELMPEITVFTTEIGQDIELYNRFKTIKNSPEFA |

|||||||||||||| |:||||||||||||||||||||||||||||||||||||||||||

| | |
|---|---|
| m128 | ERVGRIWGVVSHLNCVADTPELRAVYNELMPEITVFTTEIGQDIELYNRFKTIKNSPEFD |
| | 70 80 90 100 110 120 |
| | 130 140 150 160 170 180 |
| g128.pep | TLSPAQKTKLDHDLRDFVLSGAELPPERQAELAKLQTEGAQLSAKFSQNVLDATDAFGIY |

||||||||||:|

| | |
|---|---|
| m128 | TLSPAQKTKLNH |
| | 130 |
| | // |
| | 340 350 360 |
| g128.pep | YAGEKLREAKYAFSETEVKKYFPVGKVLAG |

||:||||||||||||| |||||||| || |

| | |
|---|---|
| m128 | TTYASEKLREAKYAFSETXVKKYFPVGXVLNG |
| | 10 20 30 |
| | 370 380 390 400 410 420 |
| g128.pep | LFAQIKKLYGIGFAEKTVPVWHKDVRYFELQQNGKTIGGVYMDLYAREGKRGGAWMNDYK |

|||| ||||||||:||||||||||||| ||||||::||||||||||||||||||||||||

| | |
|---|---|
| m128 | LFAQXKKLYGIGTTEKTVPVWHKDVRYXELQQNGEXIGGVYMDLYAREGKRGGAWMNDYK |
| | 40 50 60 70 80 90 |
| | 430 440 450 460 470 480 |
| g128.pep | GRRRFADGTLQLPTAYLVCNFAPPVGGKEARLSHDEILTLFHETGHGLHHLLTQVDELGV |

|||||:||||||||||||||||||||||:|||||||||| |||||||||||||||||||||

| | |
|---|---|
| m128 | GRRRFSDGTLQLPTAYLVCNFAPPVGGRiEARLSHDEILILFHETGHGLHHLLTQVDELGV |
| | 100 110 120 130 140 150 |
| | 490 500 510 520 530 540 |
| g128.pep | SGINGVEWDAVELPSQFMENFVWEYNVLAQMSAHEETGEPLPKELFDKMLAAKNFQRGMF |

|||||| ||||||||||||||||||||||| ||||||| |||||| || ||||||| |||

| | |
|---|---|
| m128 | SGINGVXWDAVELPSQFMENFVWEYNVLAQXSAHEETGVPLPKELXDKXLAAKNFQXGMF |
| | 160 170 180 190 200 210 |
| | 550 560 570 580 590 600 |
| g128.pep | LVRQMEFALFDMMIYSESDECRLKNWQQVLDSVRICEVAVIQPPEYNRFANSFGHIFAGGY |

||| |||||||||||||:|| ||||||||||||||:||||||||||||| ||||||||||

| | |
|---|---|
| m128 | XVRQXEFALFDMMIYSEDDEGRLKNWQQVLDSVRKKVAVIQPPEYNRFALSFGHIFAGGY |
| | 220 230 240 250 260 270 |
| | 610 620 630 640 650 660 |
| g128.pep | SAGYYSYAWAEVLSTDAYAAFEESDDVAATGKRFWQEILAVGGSRSAAESFKAFRGREPS |

||: ||||||||||:||||||||||||||||||||||||||| |||:|||||||||||||

| | |
|---|---|
| m128 | SAAXYSYAWAEVLSADAYAAFEESDDVAATGKRFWQEILAVGXSRSGAESFKAFRGREPS |
| | 280 290 300 310 320 330 |
| | 670 679 |
| g128.pep | IDALLRQSGFDNAAX |

||||||:||||||:

| | |
|---|---|
| m128 | IDALLRHSGFDNAVX |
| | 340 |

[0334] The following partial DNA sequence was identified in N. meningitidis <SEQ ID 54>:

| a128.seq | |
|---|---|
| 1 | ATGACTGACA ACGCACTGCT CCATTTGGGC GAAGAACCCC GTTTTGATCA |
| 51 | AATCAAAACC GAAGACATCA AACCCGCCCT GCAAACCGCC ATTGCCGAAG |
| 101 | CGCGCGAACA AATCGCCGCC ATCAAAGCCC AAACGCACAC CGGCTGGGCA |
| 151 | AACACTGTCG AACCCCTGAC CGGCATCACC GAACGCGTCG GCAGGATTTG |
| 201 | GGGCGTGGTG TCGCACCTCA ACTCCGTCAC CGACACGCCC GAACTGCGCG |
| 251 | CCGCCTACAA TGAATTAATG CCCGAAATTA CCGTCTTCTT CACCGAAATC |
| 301 | GGACAAGACA TCGAGCTGTA CAACCGCTTC AAAACCATCA AAAACTCCCC |
| 351 | CGAGTTCGAC ACCCTCTCCC ACGCGCAAAA AACCAAACTC AACCACGATC |
| 401 | TGCGCGATTT CGTCCTCAGC GGCGCGGAAC TGCCGCCCGA ACAGCAGGCA |
| 451 | GAATTGGCAA AACTGCAAAC CGAAGGCGCG CAACTTTCCG CCAAATTCTC |
| 501 | CCAAAACGTC CTAGACGCGA CCGACGCGTT CGGCATTTAC TTTGACGATG |
| 551 | CCGCACCGCT TGCCGGCATT CCCGAAGACG CGCTCGCCAT GTTTGCCGCT |
| 601 | GCCGCGCAAA GCGAAGGCAA AACAGGCTAC AAAATCGGTT TGCAGATTCC |
| 651 | GCACTACCTC GCCGTCATCC AATACGCCGA CAACCGCAAA CTGCGCGAAC |
| 701 | AAATCTACCG CGCCTACGTT ACCCGCGCCA GCGAGCTTTC AGACGACGGC |
| 751 | AAATTCGACA ACACCGCCAA CATCGACCGC ACGCTCGAAA ACGCCCTGCA |
| 801 | AACCGCCAAA CTGCTCGGCT TCAAAAACTA CGCCGAATTG TCGCTGGGAA |
| 851 | CCAAAATGGC GGACACCCCC GAACAAGTTT TAAACTTCCT GCACGACCTC |
| 901 | GCCCGCCGCG CCAAACCCTA CGCCGAAAAA GACCTCGCCG AAGTCAAAGC |
| 951 | CTTCGCCCGC GAAAGCCTCG GCCTCGCCGA TTTGCAACCG TGGGACTTGG |
| 1001 | GCTACGCCGG CGAAAAACTG CGCGAAGCCA AATACGCATT CAGCGAAACC |
| 1051 | GAAGTCAAAA AATACTTCCC CGTCGGCAAA GTATTAAACG GACTGTTCGC |
| 1101 | CCAAATCAAA AAACTCTACG GCATCGGATT TACCGAAAAA ACCGTCCCCG |
| 1151 | TCTGGCACAA AGACGTGCGC TATTTTGAAT TGCAACAAAA CGGCGAAACC |
| 1201 | ATAGGCGGCG TTTATATGGA TTTGTACGCA CGCGAAGGCA AACGCGGCGG |
| 1251 | CGCGTGGATG AACGACTACA AAGGCCGCCG CCGTTTTTCA GACGGCACGC |
| 1301 | TGCAACTGCC CAGCCCCTAC CTCGTCTGCA ACTTCACCCC GCCCGTCGGC |
| 1351 | GGCAAAGAAG CCCGCTTGAG CCATGACGAA ATCCTCACCC TCTTCCACGA |
| 1401 | AACCGGACAC GGCCTGCACC AGCTGCTTAC CCAAGTCGAC GAACTGGGCG |
| 1451 | TATCCGGCAT CAACGGCGTA GAATGGGACG CAGTCGAACT GCCCAGTCAG |
| 1501 | TTTATGGAAA ATTTCGTTTG GGAATACAAT GTCTTGGCGC AAATGTCCGC |
| 1551 | CCACGAAGAA ACCGGCGTTC CCCTGCCGAA AGAACTCTTC GACAAAATGC |
| 1601 | TCGCCGCCAA AAACTTCCAA GGCGGAATGT TCCTCGTCCG CCAAATGGAG |
| 1651 | TTCGCCCTCT TTGATATGAT GATTTACAGC GAAGACGACG AAGGCCGTCT |
| 1701 | GAAAAACTGG CAACAGGTTT TAGACAGCGT GCGCAAAGAA GTCGCCGTCG |
| 1751 | TCCGACCGCC CGAATACAAC CGCTTCGCCA AGAGCTTCGG CCACATCTTC |
| 1801 | GCAGGCGGCT ATTCCGCAGG CTATTACAGC TACGCGTGGG CGGAAGTATT |
| 1851 | GAGCGCGGAC GCATACGCCG CCTTTGAAGA AAGCGACGAT GTCGCCGCCA |
| 1901 | CAGGCAAACG CTTTTGGCAG GAAATCCTCG CCGTCGGCGG ATCGCGCAGC |
| 1951 | GCGGCAGAAT CCTTCAAAGC CTTCCGCGGA CGCGAACCGA GCATAGACGC |
| 2001 | ACTCTTGCGC CACAGCGGCT TCGACAACGC GGCTTGA |

[0335] This corresponds to the amino acid sequence <SEQ ID 55; ORF 128.a>:

| a128.pep | |
|---|---|
| 1 | MTDNALLHLG EEPRFDQIKT EDIKPALQTA IAEAREQIAA IKAQTHTGWA |
| 51 | NTVEPLTGIT ERVGRIWGVV SHLNSVTDTP ELRAAYNELM PEITVFFTEI |
| 101 | GQDIELYNRF KTIKNSPEFD THSHAQKTKL NHDLRDFVLS GAELPPEQQA |
| 151 | ELAKLQTEGA QLSAKFSQNV LDATDAFGIY FDDAAPLAGI PEDALAMFAA |
| 201 | AAQSEGKTGY KIGLQIPHYL AVIQYADNRK LREQIYRAYV TRASELSDDG |
| 251 | KFDNTANIDR TLENALQTAK LLGFKNYAEL SLATKMADTP EQVLNFLHDL |
| 301 | ARRAKPYAEK DLAEVKAFAR ESLGLADLQP WDLGYAGEKL REAKYAFSET |
| 351 | EVKKYFPVGK VLNGLFAQIK KLYGIGTTEK TVPVWHKDVR YFELQQNGET |
| 401 | IGGVYMDLYA REGKRGGAWM NDYKGRRRFS DGTLQLPTAY LVCNTTPPVG |
| 451 | GKEARLSHDE ILTLFHETGH GLHHLLTQVD ELGVSGINGV EWDAVELPSQ |
| 501 | FMENFVWEYN VLAQMSAHEE TGVPLPKELF DKMLAAKNFQ RGMFLVRQME |
| 551 | FALFDMMIYS EDDEGRLKNW QQVLDSVRKE VAVVRPPEYN RFANSFGHIF |
| 601 | AGGYSAGYYS YAWAEVLSAD AYAAFEESDD VAATGKRFWQ EILAVGGSRS |
| 651 | AAESFKAFRG REPSIDALLR HSGFDNAA* |

| m128/a128 ORFs 128 and 128.a showed a 66.0% identity in 677 | |
|---|---|
| aa overlap | |
| | 10 20 30 40 50 60 |
| m128.pep | MTDNALLHLGEEPRFDQIKTEDIKPALQTAIAEAREQIAAIKAQThTGWANTVEPLTGIT |

|||||||||||||||||||||||||||||||||||||||||||||||||||||||||||

| | |
|---|---|
| a128 | MTDNALLHLGEEPRFDQIKTEDIKPALQTAIAEAREQIAAIKAQTHTGWANTVEPLTGIT |
| | 10 20 30 40 50 60 |
| | 70 80 90 100 110 120 |
| m128.pep | ERVGRIWGVVSHLNCVADTPELRAVYNELMPEITVFTTEIGQDIELYNRFKTIKNSPEFD |

|||||||||||||| |:|||||||||||||||||||||||||||||||||||

| | |
|---|---|
| a128 | ERVGRIWGVVSHLNSVTDTPELRAAYNELMPEITVFTTEIGQDIELYNRFKTIKNSPEFD |
| | 70 80 90100 110 120 |
| | 130 |
| m128.pep | TLSPAQKTKLNH---------------------------------------------- |

||| ||||||||

| | |
|---|---|
| a128 | TLSHAQKTKLNHDLRDFVLSGAELPPEQQAELAKLQTEGAQLSAKFSQNVLDATDAFGIY |
| | 130 140 150 160 170 180 |
| m128.pep | ------------------------------------------------------------ |
| a128 | FDDAAPLAGIPEDALAMFAAAAQSEGKTGYKIGLQIPHYLAVIQYADNRKLREQIYRAYV |
| | 190 200 210 220 230 240 |
| m128.pep | ------------------------------------------------------------ |
| a128 | TRASELSDDGKFDNTANIDRTLENALQTAKLLGFKNYAELSLATKMADTPEQVLNFLHDL |
| | 250 260 270 280 290 300 |
| | 140 150 |
| m128.pep | ----------------------------------YASEKLREAKYAFSETXVKKYFPVGX |

||:||||||||||||| ||||||||

| | |
|---|---|
| a128 | ARRAKPYAEKDLAEVKAFARESLGLADLQPWDLGYAGEKLREAKYAFSETEVKKYFPVGK |
| | 310 320 330 340 350 360 |
| | 160 170 180 190 200 210 |
| 128.pep | VLNGLFAQXKKLYGIGTTEKTVPVWHKDVRYXELQQNGEXIGGVYMDLYAREGKRGGAWM |

|||||||| |||||||||||||||||||||| |||||||:||||||||||||||||||||

| | |
|---|---|
| a128 | VLNGLFAQIKKLYGIGTTEKTVPVWHKDVRYFELQQNGETIGGVYMDLYAREGKRGGAWM |
| | 370 380 390 400 410 420 |
| | 220 230 240 250 260 270 |
| m128.pep | NDYKGRRRFSDGTLQLPTAYLVCNFAPPVGGREARLSHDEILILFHETGHGLHHLLTQVD |

|||||||||||||||||||||||||:|||||:|||||||||| |||||||||||||||||

| | |
|---|---|
| a128 | NDYKGRRRFSDGTLQLPTAYLVCNTTPPVGGKEARLSHDEILTLFHETGHGLHHLLTQVD |
| | 430 440 450 460 470 480 |
| | 280 290 300 310 320 330 |
| m128.pep | ELGVSGINGVXWDAVELPSQFMENFVWEYNVLAQXSAHEETGVPLPKELXDKLXLAAKNFQ |

|||||||||| ||||||||||||||||||||||| |||||||||||||| || |||||||

| | |
|---|---|
| a128 | ELGVSGINGVEWDAVELPSQFMENFVWEYNVLAQMSAHEETGVPLPKELFDKMLAAKNFQ |
| | 490 500 510 520 530 540 |
| | 340 350 360 370 380 390 |
| m128.pep | XGMFXVRQXEFALFDMMIYSEDDEGRLKNWQQVLDSVRKKVAVIQPPEYNRFALSFGHIF |

||| ||| ||||||||||||||||||||||||||||||:|||::|||||||| ||||||

| | |
|---|---|
| a128 | RGMFLVRQMEFALFDMMIYSEDDEGRLKNWQQVLDSVRKEVAVVRPPEYNRFANSFGHIF |
| | 550 560 570 580 590 600 |
| | 400 410 420 430 440 450 |
| m128.pep | AGGYSAAXYSYAWAEVLSADAYAAFEESDDVAATGKRFWQEILAVGXSRSGAESFKAFRG |

||||||: |||||||||||||||||||||||||||||||||||||| |||:|||||||||

| | |
|---|---|
| a128 | AGGYSAGYYSYAWAEVLSADAYAAFEESDDVAATGKRFWQEILAVGGSRSAAESFKAFRG |
| | 610 620 630 640 650 660 |
| | 460 470 |
| m128.pep | REPSIDALLRHSGFDNAVX |

|||||||||||||||||:

| | |
|---|---|
| a128 | REPSIDALLRHSGFDNAALX |
| | 670 |

[0336] Further work revealed the DNA sequence identified in N. meningitidis <SEQ ID 56>:

| m128-1.seq | |
|---|---|
| 1 | ATGACTGACA ACGCACTGCT CCATTTGGGC GAAGAACCCC GTTTTGATCA |
| 51 | AATCAAAACC GAAGACATCA AACCCGCCCT GCAAACCGCC ATCGCCGAAG |
| 101 | CGCGCGAACA AATCGCCGCC ATCAAAGCCC AAACGCACAC CGGCTGGGCA |
| 151 | AACACTGTCG AACCCCTGAC CGGCATCACC GAACGCGTCG GCAGGATTTG |
| 201 | GGGCGTGGTG TCGCACCTCA ACTCCGTCGC CGACACGCCC GAACTGCGCG |
| 251 | CCGTCTATAA CGAACTGATG CCCGAAATCA CCGTCTTCTT CACCGAAATC |
| 301 | GGACAAGACA TCGAGCTGTA CAACCGCTTC AAAACCATCA AAAATTCCCC |
| 351 | CGAATTCGAC ACCCTCTCCC CCGCACAAAA AACCAAACTC AACCACGATC |
| 401 | TGCGCGATTT CGTCCTCAGC GGCGCGGAAC TGCCGCCCGA ACAGCAGGCA |
| 451 | GAACTGGCAA AACTGCAAAC CGAAGGCGCG CAACTTTCCG CCAAATTCTC |
| 501 | CCAAAACGTC CTAGACGCGA CCGACGCGTT CGGCATTTAC TTTGACGATG |
| 551 | CCGCACCGCT TGCCGGCATT CCCGAAGACG CGCTCGCCAT GTTTGCCGCC |
| 601 | GCCGCGCAAA GCGAAAGCAA AACAGGCTAC AAAATCGGCT TGCAGATTCC |
| 651 | ACACTACCTC GCCGTCATCC AATACGCCGA CAACCGCGAA CTGCGCGAAC |
| 701 | AAATCTACCG CGCCTACGTT ACCCGCGCCA GCGAACTTTC AGACGACGGC |
| 751 | AAATTCGACA ACACCGCCAA CATCGACCGC ACGCTCGCAA ACGCCCTGCA |
| 801 | AACCGCCAAA CTGCTCGGCT TCAAAAACTA CGCCGAATTG TCGCTGGCAA |
| 851 | CCAAAATGGC GGACACGCCC GAACAAGTTT TAAAGTTCCT GCACGACCTC |
| 901 | GCCCGCCGCG CCAAACCCTA CGCCGAAAAA GACCTCGCCG AAGTCAAAGC |
| 951 | CTTCGCCCGC GAAAGCCTGA ACCTCGCCGA TTTGCAACCG TGGGACTTGG |
| 1001 | GCTACGCCAG CGAAAAACTG CGCGAAGCCA AATACGCGTT CAGCGAAACC |
| 1051 | GAAGTCAAAA AATACTTCCC CGTCGGCAAA GTATTAAACG GACTGTTCGC |
| 1101 | CCAAATCAAA AAACTCTACG GCATCGGATT TACCGAAAAA ACCGTCCCCG |
| 1151 | TCTGGCACAA AGACGTGCGC TATTTTGAAT TGCAAGAAAA CGGCGAAACC |
| 1201 | ATAGGCGGCG TTTATATGGA TTTGTACGCA CGCGAAGGCA AACGCGGCGG |
| 1251 | CGCGTGGATG AACGACTACA AAGGCCGCCG CCGTTTTTCA GACGGCACGC |
| 1301 | TGCAACTGCC CACCGCCTAC CTCGTCTGCA ACTTCGCCCC ACCCGTCGGC |
| 1351 | GGCAGGGAAG CCCGCCTGAG CCACGACGAA ATCCTCATCC TCTTCCACGA |
| 1401 | AACCGGACAC GGGCTGCACC ACCTGCTTAC CCAAGTGGAC GAACTGGGCG |
| 1451 | TATCCGGCAT CAACGGCGTA GAATGGGACG CGGTCGAACT GCCCAGCCAG |
| 1501 | TTTATGGAAA ATTTCGTTTG GGAATACAAT GTCTTGGCAC AAATGTCAGC |
| 1551 | CCACGAAGAA ACCGGCGTTC CCCTGCCGAA AGAACTCTTC GACAAAATGC |
| 1601 | TCGCCGCCAA AAACTTCCAA CGCGGCATGT TCCTCGTCCG GCAAATGGAG |
| 1651 | TTCGCCCTCT TTGATATGAT GATTTACAGC GAAGACGACG AAGGCCGTCT |
| 1701 | GAAAAACTGG CAACAGGTTT TAGACAGCGT GCGCAAAAAA GTCGCCGTCA |
| 1751 | TCCAGCCGCC CGAATACAAC CGCTTCGCCT TGAGCTTCGG CCACATCTTC |
| 1801 | GCAGGCGGCT ATTCCGCAGG CTATTACAGC TACGCGTGGG CGGAAGTATT |
| 1851 | GAGCGCGGAC GCATACGCCG CCTTTGAAGA AAGCGACGAT GTCGCCGCCA |
| 1901 | CAGGCAAACG CTTTTGGCAG GAAATCCTCG CCGTCGGCGG ATCGCGCAGC |
| 1951 | GCGGCAGAAT CCTTCAAAGC CTTCCGCGGC CGCGAACCGA GCATAGACGC |
| 2001 | ACTCTTGCGC CACAGCGGTT TCGACAACGC GGTCTGA |

[0337] This corresponds to the amino acid sequence <SEQ ID 57; ORF 128-1>:

| m128-1.pep. | |
|---|---|
| 1 | MTDNALLHLG EEPRFDQIKT EDIKPALQTA IAEAREQIAA IKAQTHTGWA |
| 51 | NTVEPLTGIT ERVGRIWGVV SHLNSVADTP ELRAVYNELM PEITVFTTEI |
| 101 | GQDIELYNRF KTIKNSPEFD TLSPAQKTKL NHDLRDFVLS GAELPPEQQA |
| 151 | ELAKLQTEGA QLSAKFSQNV LDATDAFGIY FDDAAPLAGI PEDALAMFAA |
| 201 | AAQSESKTGY KIGLQIPHYL AVIQYADNRE LREQIYRAYV TRASELSDDG |
| 251 | KFDNTANIDR TLANALQTAK LLGFKNYAEL SLATKMADTP EQVLNFLHDL |
| 301 | ARRAKPYAEK DLAEVKAFAR ESLNLADLQP WDLGYASEKL REAKYAFSET |
| 351 | EVKKYFPVGK VLNGLFAQIK KLYGIGTTEK TVPVWHKDVR YFELQQNGET |
| 401 | IGGVYMDLYA REGKRGGAWM NDYKGRRRFS DGTLQLPTAY LVCNFAPPVG |
| 451 | GREARLSHDE ILILFHETGH GLHHLLTQVD ELGVSGINGV EWDAVELPSQ |
| 501 | FMENFVWEYN VLAQMSAHEE TGVPLPKELF DKMLAAKNFQ RGMFLVRQME |
| 551 | FALFDMMIYS EDDEGRLKNW QQVLDSVRKK VAVIQPPEYN RFALSFGHIF |
| 601 | AGGYSAGYYS YAWAEVLSAD AYAAFEESDD VAATGKRFWQ EILAVGGSRS |
| 651 | AAESFKAFRG REPSIDALLR HSGFDNAV* |

[0338] The following partial DNA sequence was identified in N. gonorrhoeae <SEQ ID 58>:

| g128-1.seq (partial) | |
|---|---|
| 1 | ATGATTGACA ACGCACTGCT CGACTTGGGC GAAGAACCCC GTTTTAATCA |
| 51 | AATCAAAACC GAAGACATCA AACCCGCCGT CCAAACCGCC ATCGCCGAAG |
| 101 | CGCGCGGACA AATCGCCGCC GTCAAAGCGC AAACGCACAG CGGCTGGGCG |
| 151 | AACACCGTCG AGCGTCTGAC CGGCATCACC GAACGCGTCG GCAGGATTTG |
| 201 | GGGCGTCGTG TCCCATCTCA ACTCCGTCGT CGACACGCCC GAACTGCGCG |
| 251 | CCGTCTATAA CGAACTGATG CCTGAAATCA CCGTCTTCTT CACCGAAATC |
| 301 | GGACAAGACA TCGAACTGTA CAACCGCTTC AAAACCATCA AAAATTCCCC |
| 351 | CGAATTTGCA ACGCTTTCCC CCGCACAAAA AACCAAGCTC GATCACGACC |
| 401 | TGCGCGATTT CGTATTGAGC GGCGCGGAAC TGCCGCCCGA ACGGCAGGCA |
| 451 | GAACTGGCAA AACTGCAAAC CGAAGGCGCG CAACTTTCCG CCAAATTCTC |
| 501 | CCAAAACGTC CTAGACGCGA CCGACGCGTT CGGCATTTAC TTTGACGATG |
| 551 | CCGCACCGCT TGCCGGCATT CCCGAAGACG CGCTCGCCAT GTTTGCCGCC |
| 601 | GCCGCGCAAA GCGAAGGCAA AACAGGTTAC AAAATCGGCT TGCAGATTCC |
| 651 | GCACTACCTT GCCGTTATCC AATACGCCGG CAACCGCGAA CTGCGCGAAC |
| 701 | AAATCTACCG CGCCTACGTT ACCCGTGCCA GCGAACTTTC AAACGACGGC |
| 751 | AAATTCGACA ACACCGCCAA CATCGACCGC ACGCTCGAAA ACGCATTGAA |
| 801 | AACCGCCAAA CTGCTCGGCT TTAAAAATTA CGCCGAATTG TCGCTGGCAA |
| 851 | CCAAAATGGC GGACACGCCC GAACAGGTTT TAAACTTCCT GCACGACCTC |
| 901 | GCCCGCCGCG CCAAACCCTA CGCCGAAAAA GACCTCGCCG AAGTCAAAGC |
| 951 | CTTCGCCCGC GAACACCTCG GTCTCGCCGA CCCGCAGCCG TGGGACTTGA |
| 1001 | GCTACGCCGG CGAAAAACTG CGCGAAGCCA AATACGCATT CAGCGAAACC |
| 1051 | GAAGTCAAAA AATACTTCCC CGTCGGCAAA GTTCTGGCAG GCCTGTTCGC |
| 1101 | CCAAATCAAA AAACTCTACG GCATCGGATT CGCCGAAAAA ACCGTTCCCG |
| 1151 | TCTGGCACAA AGACGTGCGC TATTTTGAAT TGCAACAAAA CGGCAAAACC |
| 1201 | ATCGGCGGCG TTTATATGGA TTTGTACGCA CGCGAAGGCA AACGCGGCGG |
| 1251 | CGCGTGGATG AACGACTACA AAGGCCGCCG CCGCTTTGCC GACGGCACGC |
| 1301 | TGCAACTGCC CACCGCCTAC CTCGTCTGCA ACTTCGCCCC GCCCGTCGGC |
| 1351 | GGCAAAGAAG CGCGTTTAAG CCACGACGAA ATCCTCACCC TCTTCCACGA |
| 1401 | AACCGGCCAC GGACTGCACC ACCTGCTTAC CCAAGTGGAC GAACTGGGCG |
| 1451 | TGTCCGGCAT CAACGGCGTA AAA |

[0339] This corresponds to the amino acid sequence <SEQ ID 59; ORF 128-1.ng>:

| g128-1.pep (partial) | |
|---|---|
| 1 | MIDNALLHLG EEPRFNQIKT EDIKPAVQTA IAEARGQIAA VKAQTHTGWA |
| 51 | NTVERLTGIT ERVGRIWGVV SHLNSVVDTP ELRAVYNELM PEITVFFTEI |
| 101 | GQDIELYNRF KTIKNSPEFA TLSPAQKTKL DHDLRDFVLS GAELPPERQA |
| 151 | ELAKLQTEGA QLSAKFSQNV LDATDAFGIY FDDAAPLAGI PEDALAMFAA |
| 201 | AAQSEGKTGY KIGLQIPHYL AVIQYAGNRE LREQIYRAYV TRASELSNDG |
| 251 | KFDNTANIDR TLENALKTAK LLGFKNYAEL SLATKMADTP EQVLNFLHDL |
| 301 | ARRAKPYAEK DLAEVKAFAR EHLGLADPQP WDLSYAGEKL REAKYAFSET |
| 351 | EVKKYFPVGK VLAGLFAQIK KLYGIGFAEK TVPVWHKDVR YFELQQNGKT |
| 401 | IGGVYMDLYA REGKRGGAWM NDYKGRRRFA DGTLQLPTAY LVCNFAPPVG |
| 451 | GKEARLSHDE ILTLFHETGH GLHHLLTQVD ELGVSGINGV K |

| m128-1/g128-1 ORFs 128-1 and 128-1.ng showed a 94.5% | |
|---|---|
| identity in 491 aa overlap | |
| | 10 20 30 40 50 60 |
| g128-1.pep | MIDNALLHLGEEPRFNQIKTEDIKPAVQTAIAEARGQIAAVKAQTHTGWANTVERITGIT |

| |||||||||||||:||||||||||:|||||||| ||||:||||||||||||| |||||

| | |
|---|---|
| m128-1 | MTDNALLHLGEEPRFDQIKTEDIKPALQTAIAEAREQIAAIKAQTHTGWANTVEPLTGIT |
| | 10 20 30 40 50 60 |
| | 70 80 90 100 110 120 |
| g128-1.pep | ERVGRIWGVVSHLNSVVDTPELRAVYNELMPEITVFFTEIGQDIELYNRIFKTIKNSPEFA |

||||||||||||||||:||||||||||||||||||||||||||||||||||||||||||

| | |
|---|---|
| m128-1 | ERVGRIWGVVSHLNSVADTPELRAVYNELMPEITVFFTEIGQDIELYNRFKTIKNSPEFD |
| | 70 80 90100 110 120 |
| | 130 140 150 160 170 180 |
| g128-1.pep | TLSPAQKTKLDHDLRDFVLSGAELPPERQAELAKLQTEGAQLSAKFSQNVLDATDAFGIY |

||||||||||:||||||||||||||||:||||||||||||||||||||||||||||||||

| | |
|---|---|
| m128-1 | TLSPAQKTKLNHDLRDFVLSGAELPPEQQAELAKLQTEGAQLSAKFSQNVLDATDAFGIY |
| | 130 140 150 160 170 180 |
| | 190 200 210 220 230 240 |
| g128-1.pep | FDDAAPLAGIPEDALAMFAAAAQSEGKTGYKIGLQIPHYLAVIQYAGNRELREQIYRAYV |

||||||||||||||||||||||||||||||:|||||||||||||||||||| |||||||||||||

| | |
|---|---|
| m128-1 | FDDAAPLAGIPEDALAMFAAAAQSESKTGYKIGLQIPHYLAVIQYADNRELREQIYRAYV |
| | 190 200 210 220 230 240 |
| | 250 260 270 280 290 300 |
| g128-1.pep | TRASELSNDGKFDNTANIDRTLENALKTAKLLGFKNYAELSLATKMADTPEQVLNFLHDL |

|||||||:|||||||||||||| |||:||||||||||||||||||||||||||||||||

| | |
|---|---|
| m128-1 | TRASELSDDGKFDNTANIDRTLANALQTAKLLGFKNYAELSLATKMADTPEQVLNFLHDL |
| | 250 260 270 280 290 300 |
| | 310 320 330 340 350 360 |
| g128-1.pep | ARRAKPYAEKDLAEVKAFAREHLGLADPQPWDLSYAGEKLREAKYAFSETEVKKYFPVGK |

||||||||||||||||||||| |:||| |||||:||:||||||||||||||||||||||||

| | |
|---|---|
| m128-1 | ARRAKPYAEKDLAEVKAFARESLNLADLQPWDLGYASEKLREAKYAFSETEVKKYFPVGK |
| | 310 320 330 340 350 360 |
| | 370 380 390 400 410 420 |
| g128-1.pep | VLAGLFAQIKKLYGIGFAEKTVPVWHKDVRYFELQQNGKTIGGVYMDLYAREGKRGGAWM |

|| ||||||||||||||:||||||||||||||||||||:|||||||||||||||||||||

| | |
|---|---|
| m128-1 | VLNGLFAQIKKLYGIGTTEKTVPVWHKDVRYFELQQNGETIGGVYMDLYAREGKRGGAWM |
| | 370 380 390 400 410 420 |
| | 430 440 450 460 470 480 |
| g128-1.pep | NDYKGRRRFADGTLQLPTAYLVCNFAPPVGGKEARLSHDEILTLFHETGHGLHHLLTQVD |

|||||||||:|||||||||||||||||||||:|||||||||| |||||||||||||||||

| | |
|---|---|
| m128-1 | NDYKGRRRFSDGTLQLPTAYLVCNFAPPVGGREARLSHDEILILFHETGHGLHHLLTQVD |
| | 430 440 450 460 470 480 |
| | 490 |
| g128-1.pep | ELGVSGINGVK |

||||||||||:

| | |
|---|---|
| m128-1 | ELGVSGINGVEWDAVELPSQFMENFVWEYNVLAQMSAHEETGVPLPKELFDKMLAAKNFQ |
| | 490 500 510 520 530 540 |

[0340] The following DNA sequence was identified in N. meningitidis <SEQ ID 60>:

| a128-1.seq | |
|---|---|
| 1 | ATGACTGACA ACGCACTGCT CCATTTGGGC GAAGAACCCC GTTTTGATCA |
| 51 | AATCAAAACC GAAGACATCA AACCCGCCCT GCAAACCGCC ATTGCCGAAG |
| 101 | CGCGCGAACA AATCGCCGCC ATCAAAGCCC AAACGCACAC CGGCTGGGCA |
| 151 | AACACTGTCG AACCCCTGAC CGGCATCACC GAACGCGTCG GCAGGATTTG |
| 201 | GGGCGTGGTG TCGCACCTCA ACTCCGTCAC CGACACGCCC GAACTGCGCG |
| 251 | CCGCCTACAA TGAATTAATG CCCGAAATTA CCGTCTTCTT CACCGAAATC |
| 301 | GGACAAGACA TCGAGCTGTA CAACCGCTTC AAAACCATCA AAAACTCCCC |
| 351 | CGAGTTCGAC ACCCTCTCCC ACGCGCAAAA AACCAAACTC AACCACGATC |
| 401 | TGCGCGATTT CGTCCTCAGC GGCGCGGAAC TGCCGCCCGA ACAGCAGGCA |
| 451 | GAATTGGCAA AACTGCAAAC CGAAGGCGCG CAACTTTCCG CCAAATTCTC |
| 501 | CCAAAACGTC CTAGACGCGA CCGACGCGTT CGGCATTTAC TTTGACGATG |
| 551 | CCGCACCGCT TGCCGGCATT CCCGAAGACG CGCTCGCCAT GTTTGCCGCT |
| 601 | GCCGCGCAAA GCGAAGGCAA AACAGGCTAC AAAATCGGTT TGCAGATTCC |
| 651 | GCACTACCTC GCCGTCATCC AATACGCCGA CAACCGCAAA CTGCGCGAAC |
| 701 | AAATCTACCG CGCCTACGTT ACCCGCGCCA GCGAGCTTTC AGACGACGGC |
| 751 | AAATTCGACA ACACCGCCAA CATCGACCGC ACGCTCGAAA ACGCCCTGCA |
| 801 | AACCGCCAAA CTGCTCGGCT TCAAAAACTA CGCCGAATTG TCGCTGGCAA |
| 851 | CCAAAATGGC GGACACCCCC GAACAAGTTT TAAACTTCCT GCACGACCTC |
| 901 | GCGCGCCGCG CCAAACCCTA CGCCGAAAAA GACCTCGCCG AAGTCAAAGC |
| 951 | CTTCGCCCGC GAAAGCCTCG GCCTGGCCGA TTTGCAACCG TGGGACTTGG |
| 1001 | GCTACGCCGG CGAAAAACTG CGCGAAGCCA AATACGCATT CAGCGAAACC |
| 1051 | GAAGTCAAAA AATACTTCCC CGTCGGCAAA GTATTAAACG GACTGTTCGC |
| 1101 | CCAAATCAAA AAACTCTACG GCATCGGATT TACCGAAAAA ACCGTCCCCG |
| 1151 | TCTGGCACAA AGACGTGCGC TATTTTGAAT TGCAACAAAA CGGCGAAACC |
| 1201 | ATAGGCGGCG TTTATATGGA TTTGTACGCA CGCGAAGGCA AACGCGGCGG |
| 1251 | CGCGTGGATG AACGACTACA AAGGCCGCCG CCGTTTTTCA GACGGCACGC |
| 1301 | TGCAACTGCC CACCGCCTAC CTCGTCTGCA ACTTCACCCC GCCCGTCGGC |
| 1351 | GGCAAAGAAG CCCGCTTGAG CCATGACGAA ATCCTCACCC TCTTCCACGA |
| 1401 | AACCGGACAC GGCCTGCACC ACCTGCTTAC CCAAGTCGAC GAACTGGGCG |
| 1451 | TATCCGGCAT CAACGGCGTA GAATGGGACG CAGTCGAACT GCCCAGTCAG |
| 1501 | TTTATGGAAA ATTTCGTTTG GGAATACAAT GTCTTGGCGC AAATGTCCGC |
| 1551 | CCACGAAGAA ACCGGCGTTC CCCTGCCGAA AGAACTCTTC GACAAAATGC |
| 1601 | TCGCCGCCAA AAACTTCCAA CGCGGAATGT TCCTCGTCCG CCAAATGGAG |
| 1651 | TTCGCCCTCT TTGATATGAT GATTTACAGC GAAGACGACG AAGGCCGTCT |
| 1701 | GAAAAACTGG CAACAGGTTT TAGACAGGGT GCGCAAAGAA GTCGCCGTCG |
| 1751 | TCCGACCGCC CGAATACAAC CGCTTCGCCA ACAGCTTCGG CCACATCTTC |
| 1801 | GCAGGCGGCT ATTCCGCAGG CTATTACAGC TACGCGTGGG CGGAAGTATT |
| 1851 | GAGCGCGGAC GCATACGCCG CCTTTGAAGA AAGCGACGAT GTCGCCGCCA |
| 1901 | CAGGCAAACG CTTTTGGCAG GAAATCGTCG CCGTCGGCGG ATCGCGCAGC |
| 1951 | GCGGCAGAAT CCTTCAAAGC CTTCCGCGGA CGCGAACCGA GCATAGACGC |
| 2001 | ACTCTTGCGC CACAGCGGCT TCGACAACGC GGCTTGA |

[0341] This corresponds to the amino acid sequence <SEQ ID 61; ORF 128-1.a>:

| a128-1.pep | |
|---|---|
| 1 | MTDNALLHLG EEPRFDQIKT EDIKPALQTA IAEAREQIAA IKAQTHTGWA |
| 51 | NTVEPLTGIT ERVGRIWGVV SHLNSVTDTP ELRAAYNELM PEITVFTTEI |
| 101 | GQDIELYNRF KTTKNSPEFD THSHAQKTKL NHDLRDFVLS GAELPPEQQA |
| 151 | ELAKLQTEGA QLSAKFSQNV LDATDAFGIY FDDAAPLAGI PEDALAMFAA |
| 201 | AAQSEGKTGY KIGLQIPHYL AVIQYADNRK LREQIYRAYV TRASELSDDG |
| 251 | KFDNTANIDR TLENALQTAK LLGFKNYAEL SLATKMADTP EQVLNFLHDL |
| 301 | ARRAKPYAEK DLAEVKAFAR ESLGLADLQP WDLGYAGEKL REAKYAFSET |
| 351 | EVKKYFPVGK VLNGLFAQIK KLYGIGTTEK TVPVWHKDVR YFELQQNGET |
| 401 | IGGVYMDLYA REGKRGGAWM NDYKGRRRFS DGTLQLPTAY LVCNTTPPVG |
| 451 | GKEARLSHDE ILTLFHETGH GLHHLLTQVD ELGVSGINGV EWDAVELPSQ |
| 501 | FMENFVWEYN VLAQMSAHEE TGVPLPKELF DKMLAAKNFQ RGMFLVRQME |
| 551 | FALFDMMIYS EDDEGRLKNW QQVLDSVRKE VAVVRPPEYN RFANSFGHIF |
| 601 | AGGYSAGYYS YAWAEVLSAD AYAAFEESDD VAATGKRFWQ EILAVGGSRS |
| 651 | AAESFKAFRG REPSIDALLR HSGFDNAA* |

| m128-1/a128-1 ORFs 128-1 and 128-1.a showed a 97.8% identity | |
|---|---|
| in 677 aa overlap | |
| | 10 20 30 40 50 60 |
| a128-1.pep | MTDNALLHLGEEPRFDQIKTEDIKPALQTAIAEAREQIAAIKAQTHTGWANTVEPLTGIT |

||||||||||||||||||||||||||||||||||||||||||||||||||||||||||||

| | |
|---|---|
| m128-1 | MTDNALLHLGEEPRFDQIKTEDIKPALQTAIAEAREQIAAIKAQTHTGWANTVEPLTGIT |
| | 10 20 30 40 50 60 |
| | 70 80 90 100 110 120 |
| a128-1.pep | ERVGRIWGVVSHLNSVTDTPELRAAYNELMPEITVFTTEIGQDIELYNRFKTTKNSPEFD |

||||||||||||||||:|||||||:|||||||||||||||||||||||||||||||||||

| | |
|---|---|
| m128-1 | ERVGRIWGVVSHLNSVADTPELRAVYNELMPEITVFTTEIGQDIELYNRFKTTKNSPEFD |
| | 70 80 90 100 110 120 |
| | 130 140150 160 170 180 |
| a128-1.pep | TLSHAQKTKLNHDLRDFVLSGAELPPEQQAELAKLQTEGAQLSAKFSQNVLDATDAFGIY |

||| ||||||||||||||||||||||||||||||||||||||||||||

| | |
|---|---|
| m128-1 | TLSPAQKTKLNHDLRDFVLSGAELPPEQQAELAKLQTEGAQLSAKFSQNVLDATDAFGIY |
| | 130 140 150 160 170 180 |
| | 190 200 210 220 230 240 |
| a128-1.pep | FDDAAPLAGIPEDALAMFAAAAQSEGKTGYKIGLQIPHYLAVIQYADNRKLREQIYRAYV |

|||||||||||||||||||||||||:|||||||||||||||||||||||:|||||||||||

| | |
|---|---|
| m128-1 | FDDAAPLAGIPEDALAMFAAAAQSESKTGYKIGLQIPHYLAVIQYADNRELREQIYRAYV |
| | 190 200 210 220 230 240 |
| | 250 260 270 280 290 300 |
| a128-1.pep | TRASELSDDGKFDNTANIDRTLENALQTAKLLGFKNYAELSLATKMADTPEQVLNFLHDL |

|||||||||||||||||||| |||||||||||||||||||||||||||||||||||||

| | |
|---|---|
| m128-1 | TRASELSDDGKFDNTANIDRTLANALQTAKLLGFKNYAELSLATKMADTPEQVLNFLHDL |
| | 250 260 270 280 290 300 |
| | 310 320 330 340 350 360 |
| a128-1.pep | ARRAKPYAEKDLAEVKAFARESLGLADLQPWDLGYAGEKLREAKYAFSETEVKKYFPVGK |

|||||||||||||||||||||||:||||||||||||:|||||||||||||||||||||||

| | |
|---|---|
| m128-1 | ARRAKPYAEKDLAEVKAFARESLNLADLQPWDLGYASEKLREAKYAFSETEVKKYFPVGK |
| | 310 320 330 340 350 360 |
| | 370 380 390 400 410 420 |
| a128-1.pep | VLNGLFAQIKKLYGIGTTEKTVPVWHKDVRYFELQQNGETTGGVYMDLYAREGKRGGAWM |

||||||||||||||||||||||||||||||||||||||||||||||||||||||||||||

| | |
|---|---|
| m128-1 | VLNGLFAQIKKLYGIGTTEKTVPVWHKDVRYFELQQNGETTGGVYMDLYAREGKRGGAWM |
| | 370 380 390 400 410 420 |
| | 430 440 450 460 470 480 |
| a128-1.pep | NDYKGRRRFSDGTLQLPTAYLVCNTTPPVGGKEARLSHDEILTLFHETGHGLHHLLTQVD |

|||||||||||||||||||||||:|||||:|||||||||| |||||||||||||||||

| | |
|---|---|
| m128-1 | NDYKGRRRFSDGTLQLPTAYLVCNFAPPVGGREARLSHDEILILFHETGHGLHHLLTQVD |
| | 430 440 450 460 470 480 |
| | 490 500 510 520 530 540 |
| a128-1.pep | ELGVSGINGVEWDAVELPSQFMENFVWEYNVLAQMSAHEETGVPLPKELFDKMLAAKNFQ |

||||||||||||||||||||||||||||||||||||||||||||||||||||||||||||

| | |
|---|---|
| m128-1 | ELGVSG1NGVEWDAVELPSQFMENFVWEYNVLAQMSAHEETGVPLPKELFDKMLAAKNFQ |
| | 490 500 510 520 530 540 |
| | 550 560 570 580 590 600 |
| a128-1.pep | RGMFLVRQMEFALFDMMIYSEDDEGRLKNWQQVLDSVRKEVAVVRPPEYNRFANSFGHIF |

|||||||||||||||||||||||||||||||||||||||:|||::|||||||| ||||||

| | |
|---|---|
| m128-1 | RGMFLVRQMEFALFDMMIYSEDDEGRLKNWQQVLDSVRXKVAVIQPPEYNRFALSFGHIF |
| | 550 560 570 580 590 600 |
| | 610 620 630 640 650 660 |
| a128-1.pep | AGGYSAGYYSYAWAEVLSADAYAAFEESDDVAATGKRFWQEILAVGGSRSAAESFKAPRG |

||||||||||||||||||||||||||||||||||||||||||||||||||||||||||||

| | |
|---|---|
| m128-1 | AGGYSAGYYSYAWAEVLSADAYAAFEESDDVAATGKRFWQEILAVGGSRSAAESFKAPRG |
| | 610 620 630 640 650 660 |
| | 670 679 |
| a128-1.pep | REPSIDALLRHSGFDNAAX |

|||||||||||||||||:

| | |
|---|---|
| m128-1 | REPSIDALLRHSGFDNAVX |
| | 670 |

[0342] The following partial DNA sequence was identified in N. meningitidis <SEQ ID 62>:

| m206.seq | |
|---|---|
| 1 | ATGTTTCCCC CCGACAAAAC CCTTTTCCTC TGTCTCAGCG CACTGCTCCT |
| 51 | CGCCTCATGC GGCACGACCT CCGGCAAACA CCGCCAACCG AAACCCAAAC |
| 101 | AGACAGTCCG GCAAATCCAA GCCGTCCGCA TCAGCCACAT CGACCGCACA |
| 151 | CAAGGCTCGC AGGAACTCAT GCTCCACAGC CTCGGACTCA TCGGCACGCG |
| 201 | CTACAAATGG GGCGGCAGCA GCACCGCAAC CGGCTTCGAT TGCAGCGGCA |
| 251 | TGATTCAATT CGTTTACAAr AACGCCCTCA ACGTCAAGCT GCCGCGCACC |
| 301 | GCCCGCGACA TGGCGGCGGC AAGCCGsAAA ATCCCCGAcA GCCGCyTCAA |
| 351 | GGCCGGCGAC CTCGTATTCT TCAACACCGG CGGCGCACAC CGCTACTCAC |
| 401 | ACGTCGGACT CTACATCGGC AACGGCGAAT TCATCCATGC CCCCAGCAGC |
| 451 | GGCAAAACCA TCAAAACCGA AAAACTCTCC ACACCGTTTT ACGCCAAAAA |
| 501 | CTACCTCGGC GCACATACTT TTTTTACAGA ATGA |

[0343] This corresponds to the amino acid sequence <SEQ ID 63; ORF 206>:

m206.pep

| | |
|---|---|
| 1 | MFPPDKTLFL CLSALLLASC GTTSGKHRQP KPKQTVRQIQ |
| | AVRISHIDRT |
| 51 | QGSQELMLHS LGLIGTPYKW GGSSTATGFD CSGMIQFVYK |
| | NALNVKLPRT |
| 101 | ARDMAAASRK IPDSRXKAGD LVFFNTGGAH RYSHVGLYIG |
| | NGEFIHAPSS |
| 151 | GKTIKTEKLS TPFYAKNYLG AHTFFTE* |

[0344] The following partial DNA sequence was identified in N. gonorrhoeae <SEQ ID 64>:

g206.seq

| | |
|---|---|
| 1 | atgttttccc ccgacaaaac ccttttcctc tgtctcggcg |
| | cactgctcct |
| 51 | cgcctcatgc ggcacgacct ccggcaaaca ccgccaaccg |
| | aaacccaaac |
| 101 | agacagtccg gcaaatccaa gccgtccgca tcagccacat |
| | cggccgcaca |
| 151 | caaggctcgc aggaactcat gctccacagc ctcggactca |
| | tcggcacgcc |
| 201 | ctacaaatgg ggcggcagca gcaccgcaac cggcttcgac |
| | tgcagcggca |
| 251 | tgattcaatt ggtttacaaa aacgccctca acgtcaagct |
| | gccgcgcacc |
| 301 | gcccgcgaca tggcggcggc aagccgcaaa atccccgaca |
| | gccgcctcaa |
| 351 | ggccggcgac atcgtattct tcaacaccgg cggcgcacac |
| | cgctactcac |
| 401 | acgtcggact ctacatcggc aacggcgaat tcatccatgc |
| | ccccggcagc |
| 451 | ggcaaaacca tcaaaaccga aaaactctcc acaccgtttt |
| | acgccaaaaa |
| 501 | ctaccttgga gcgcatacgt tttttacaga atga |

[0345] This corresponds to the amino acid sequence <SEQ ID 65; ORF 206.ng>:

g206.pep

| | |
|---|---|
| 1 | MFSPDKTLFL CLGALLLASC GTTSGKHRQP KPKQTVRQIQ |
| | AVRISHIGRT |
| 51 | QGSQELMLHS LGLIGTPYKW GGSSTATGFD CSGMIQLVYK |
| | NALNVKLPRT |
| 101 | ARDMAAASRK IPDSRLKAGD IVFFNTGGAH RYSHVGLYIG |
| | NGEFIHAPGS |
| 151 | GKTIKTEKLS TPFYAKNYLG AHTFFTE* |

[0346] ORF 206 shows 96.0% identity over a 177 aa overlap with a predicted ORF (ORF 206.ng) from N. gonorrhoeae:

| m206/g206 | |
|---|---|
| | 10 20 30 40 50 60 |
| m206.pep | MFPPDKTLFLCLSALLLASCGTTSGKHRQPKPKQTVRQIQAVRISHIDRTQGSQELMLHS |
| | \|\| \|\|\|\|\|\|\|\|\|:\|\|\|\|\|\|\|\|\|\|\|\|\|\|\|\|\|\|\|\|\|\|\|\|\|\|\|\|\|\|\|\|\|\| \|\|\|\|\|\|\|\|\|\|\|\| |
| g206 | MFSPDKTLFLCLGALLLASCGTTSGKHRQPKPKQTVRQIQAVRISHIGRTQGSQELMLHS |
| | 10 20 30 40 50 60 |
| | 70 80 90 100 110 120 |
| m206.pep | LGLIGTPYKWGGSSTATGFDCSGMIQFVYKNALNVKLPRTARDMAAASRKIPDSRXKAGD |
| | \|\|\|\|\|\|\|\|\|\|\|\|\|\|\|\|\|\|\|\|\|\|\|\|\|\|:\|\|\|\|\|\|\|\|\|\|\|\|\|\|\|\|\|\|\|\|\|\|\|\|\|\|\|\| \|\|\|\| |
| g206 | LGLIGTPYKWGGSSTATGFDCSGMIQLVYKNALNVKLPRTARDMAAASRKIPDSRLKAGD |
| | 70 80 90 100 110 120 |
| | 130 140 150 160 170 |
| m206.pep | LVFFNTGGAHRYSHVGLYIGNGEFIHAPSSGKTIKTEKLSTPFYAKNYLGAHTFFTEX |
| | :\|\|\|\|\|\|\|\|\|\|\|\|\|\|\|\|\|\|\|\|\|\|\|\|\|\|\|:\|\|\|\|\|\|\|\|\|\|\|\|\|\|\|\|\|\|\|\|\|\|\|\|\|\|\|\|\|\|\| |
| g206 | IVFFNTGGAHRYSHVGLYIGNGEFIHAPGSGKTIKTEKLSTPFYAKNYLGAHTFFTE |
| | 130 140 150 160 170 |

[0347] The following partial DNA sequence was identified in N. meningitidis <SEQ ID 66>:

a206.seq

| | |
|---|---|
| 1 | ATGTTTCCCC CCGACAAAAC CCTTTTCCTC TGTCTCAGCG |
| | CAGTGGTCCT |
| 51 | CGCCTCATGC GGCACGACCT CCGGCAAACA CCGCCAACCG |
| | AAACCCAAAC |
| 101 | AGACAGTCCG GCAAATCCAA GGCGTCCGCA TCAGGCACAT |
| | CGACCGCACA |
| 151 | CAAGGCTCGC AGGAACTCAT GGTCCACAGC CTCGGACTCA |
| | TCGGCACGCC |
| 201 | CTACAAATGG GGCGGCAGCA GCACCGCAAC CGGCTTCGAT |
| | TGCAGCGGCA |
| 251 | TGATTCAATT CGTTTACAAA AACGCCCTCA ACGTCAAGCT |
| | GCCGCGCACC |
| 301 | GGCCGCGACA TGGCGGCGGC AAGCCGCAAA ATCCGCGAGA |
| | GCCGCCTTAA |
| 351 | GGCCGGCGAC CTCGTATTCT TCAACACCGG CGGCGGACAC |
| | CGCTACTCAC |
| 401 | ACGTCGGACT CTATATCGGC AACGGCGAAT TGATCCATGC |
| | GCCCAGCAGC |
| 451 | GGCAAAACCA TCAAAACCGA AAAAGTCTCC ACACCGTTTT |
| | ACGCCAAAAA |
| 501 | CTACCTCGGC GCACATACTT TCTTTACAGA ATGA |

[0348] This corresponds to the amino acid sequence <SEQ ID 67; ORF 206.a>:

| a206.pep | | |
|---|---|---|
| | 1 | MFPPDKTLFL CLSALLLASC GTTSGKHRQP KPKQTVRQIQ |
| | | AVRISHIDRT |
| | 51 | QGSQELMLHS LGLIGTPYKW GGSSTATGFD CSGMIQFVYK |
| | | NALNVKLPRT |
| | 101 | ARDMAAASRK IPDSRLKAGD LVFFNTGGAH RYSHVGLYIG |
| | | NGEFIHAPSS |
| | 151 | GKTIKTEKLS TPFYAKNYLG AHTFFTE* |

| | |
|---|---|
| m206/a206 | ORFs 206 and 206.a showed a 99.4% identity in 177 aa overlap |
| | 10 20 30 40 50 60 |
| m206.pep | MFPPDKTLFLCLSALLLASCGTTSGKHRQPKPKQTVRQIQAVRISHIDRTQGSQELMLHS |
| | \|\|\|\|\|\|\|\|\|\|\|\|\|\|\|\|\|\|\|\|\|\|\|\|\|\|\|\|\|\|\|\|\|\|\|\|\|\|\|\|\|\|\|\|\|\|\|\|\|\|\|\|\|\|\|\|\|\|\|\| |
| a206 | MFPPDKTLFLCLSALLLASCGTTSGKHRQPKPKQTVRQIQAVRISHIDRTQGSQELMLHS |
| | 10 20 30 40 50 60 |
| | 70 80 90 100 110 120 |
| m206.pep | LGLIGTPYKWGGSSTATGFDCSGMIQFVYKNALNVKLPRTARDMAAASRKIPDSRXKAGD |
| | \|\|\|\|\|\|\|\|\|\|\|\|\|\|\|\|\|\|\|\|\|\|\|\|\|\|\|\|\|\|\|\|\|\|\|\|\|\|\|\|\|\|\|\|\|\|\|\|\|\|\|\|\|\|\| \|\|\|\| |
| a206 | LGLIGTPYKWGGSSTATGFDCSGMIQFVYKNALNVKLPRTARDMAAASRKIPDSRLKAGD |
| | 70 80 90 100 110 120 |
| | 130 140 150 160 170 |
| m206.pep | LVFFNTGGAHRYSHVGLYIGNGEFIHAPSSGKTIKTEKLSTPFYAKNYLGAHTFFTEX |
| | \|\|\|\|\|\|\|\|\|\|\|\|\|\|\|\|\|\|\|\|\|\|\|\|\|\|\|\|\|\|\|\|\|\|\|\|\|\|\|\|\|\|\|\|\|\|\|\|\|\|\|\|\|\|\|\|\|\|\|\| |
| a206 | LVFFNTGGAHRYSHVGLYIGNGEFIHAPSSGKTIKTEKLSTPFYAKNYLGAHTFFTEX |
| | 130 140 150 160 170 |
| 287 | |

[0349] The following partial DNA sequence was identified in N. meningitidis <SEQ ID 68>:

m287.seq

| | |
|---|---|
| 1 | ATGTTTAAAC GCAGCGTAAT CGCAATGGCT TGTATTTTTG |
| | CCCTTTCAGC |
| 51 | CTGCGGGGGC GGCGGTGGCG GATCGCCCGA TGTCAAGTCG |
| | GCGGACACGC |
| 101 | TGTCAAAACC TGCCGCCCCT GTTGTTTCTG AAAAAGAGAC |
| | AGAGGCAAAG |
| 151 | GAAGATGCGC CACAGGCAGG TTCTCAAGGA CAGGGCGCGC |
| | CATCCGCACA |
| 201 | AGGCAGTCAA GATATGGCGG CGGTTTCGGA AGAAAATACA |
| | GGCAATGGCG |
| 251 | GTGCGGTAAC AGCGGATAAT CCCAAAAATG AAGACGAGGT |
| | GGCACAAAAT |
| 301 | GATATGCCGC AAAATGCCGC CGGTACAGAT AGTTCGACAC |
| | CGAATCACAC |
| 351 | CCCGGATCCG AATATGCTTG CCGGAAATAT GGAAAATCAA |
| | GCAACGGATG |
| 401 | CCGGGGAATC GTCTCAGCCG GCAAACCAAC CGGATATGGC |
| | AAATGCGGCG |
| 451 | GACGGAATGC AGGGGGACGA TCCGTCGGCA GGCGGGCAAA |
| | ATGCCGGCAA |
| 501 | TACGGCTGCC CAAGGTGCAA ATCAAGCCGG AAACAATCAA |
| | GCCGCCGGTT |
| 551 | CTTCAGATCC CATGCCCGCG TCAAACCCTG CACCTGCGAA |
| | TGGCGGTAGC |
| 601 | AATTTTGGAA GGGTTGATTT GGCTAATGGC GTTTTGATTG |
| | ACGGGCCGTC |
| 651 | GCAAAATATA ACGTTGACCC ACTGTAAAGG CGATTCTTGT |
| | AGTGGCAATA |
| 701 | ATTTCTTGGA TGAAGAAGTA CAGCTAAAAT CAGAATTTGA |
| | AAAATTAAGT |
| 751 | GATGCAGACA AAATAAGTAA TTACAAGAAA GATGGGAAGA |
| | ATGATAAATT |
| 801 | TGTCGGTTTG GTTGCCGATA GTGTGCAGAT GAAGGGAATC |
| | AATCAATATA |
| 851 | TTATCTTTTA TAAACCTAAA CCCACTTCAT TTGCGCGATT |
| | TAGGCGTTCT |
| 901 | GCACGGTCGA GGCGGTCGCT TCCGGCCGAG ATGCCGCTGA |
| | TTCCCGTCAA |
| 951 | TCAGGCGGAT ACGCTGATTG TCGATGGGGA AGCGGTCAGC |
| | CTGACGGGGC |
| 1001 | ATTCCGGGAA TATGTTCGCG CCCGAAGGGA ATTACCGGTA |
| | TCTGACTTAC |
| 1051 | GGGGCGGAAA AATTGCCCGG CGGATCGTAT GGCCTTCGTG |
| | TTCAAGGCGA |
| 1101 | ACCGGCAAAA GGCGAAATGC TTGCGGGCGC GGCCGTGTAC |
| | AACGGCGAAG |
| 1151 | TAGTGCATTT CCATACGGAA AAGGGCGGTG CGTACCCGAG |
| | GAGGGGCAGG |
| 1201 | TTTGCCGCAA AAGTCGATTT CGGCAGCAAA TCTGTGGACG |
| | GCATTATCGA |
| 1251 | CAGCGGCGAT GATTTGCATA TGGGTACGCA AAAATTCAAA |
| | GCCGCCATCG |
| 1301 | ATGGAAAGGG CTTTAAGGGG ACTTGGACGG AAAATGGCAG |
| | CGGGGATGTT |
| 1351 | TCCGGAAAGT TTTACGGCCC GGCCGGCGAG GAAGTGGCGG |
| | GAAAATACAG |
| 1401 | CTATCGCCCG ACAGATGCGG AAAAGGGCGG ATTGGGCGTG |
| | TTTGCCGGCA |
| 1451 | AAAAAGAGCA GGATTGA |

[0350] This corresponds to the amino acid sequence <SEQ ID 69; ORF 287>:

m287.pep

| | |
|---|---|
| 1 | MFKRSVIAMA CIFALSACGG GGGGSPDVKS ADTLSKPAAP |
| | VVSEKETEAK |
| 51 | EDAPQAGSQG QGAPSAQGSQ DMAAVSEENT GNGGAVTADN |
| | PKNEDEVAQN |
| 101 | DMPQNAAGTD SSTPNHTPDP NMLAGNMENQ ATDAGESSQP |
| | ANQPDMANAA |
| 151 | DGMQGDDPSA GGQNAGNTAA QGANQAGNNQ AAGSSDPIPA |
| | SNPAPANGGS |
| 201 | NFGRVDLANG VLIDGPSQNI TLTHCKGDSC SGNNFLDEEV |
| | QLKSEFEKLS |
| 251 | DADKISNYKK DGKNDKFVGL VADSVQMKGI NQYIIFYKPK |
| | PTSFARFRRS |
| 301 | ARSRRSLPAE MPLIPVNQAD TLIVDGEAVS LTGHSGNIFA |
| | PEGNYRYLTY |
| 351 | GAEKLPGGSY ALRVQGEPAK GEMLAGAAVY NGEVLHFHTE |
| | NGRPYPTRGR |
| 401 | FAAKVDFGSK SVDGIIDSGD DLHMGTQKFK AAIDGNGFKG |
| | TWTENGSGDV |
| 451 | SGKFYGPAGE EVAGKYSYRP TDAEKGGFGV FAGKKEQD* |

[0351] The following partial DNA sequence was identified in N. gonorrhoeae <SEQ ID 70>:

g287.seq

| | |
|---|---|
| 1 | atgtttaaac gcagtgtgat tgcaatggct tgtatttttc |
| | ccctttcagc |
| 51 | ctgtgggggc ggcggtggcg gatcgcccga tgtcaagtcg |
| | gcggacacgc |
| 101 | cgtcaaaacc ggccgccccc gttgttgctg aaaatgccgg |
| | ggaaggggtg |
| 151 | ctgccgaaag aaaagaaaga tgaggaggca gcgggcggtg |
| | cgccgcaagc |
| 201 | cgatacgcag gacgcaaccg ccggagaagg cagccaagat |
| | atggcggcag |
| 251 | tttcggcaga aaatacaggc aatggcggtg cggcaacaac |
| | ggacaacccc |
| 301 | aaaaatgaag acgcgggggc gcaaaatgat atgccgcaaa |
| | atgccgccga |
| 351 | atccgcaaat caaacaggga acaaccaacc cgccggttct |
| | tcagattccg |
| 401 | cccccgcgtc aaaccctgcc cctgcgaatg gcggtagcga |
| | ttttggaagg |
| 451 | acgaacgtgg gcaattctgt tgtgattgac ggaccgtcgc |
| | aaaatataac |
| 501 | gttgacccac tgtaaaggcg attcttgtaa tggtgataat |
| | ttattggatg |
| 551 | aagaagcacc gtcaaaatca gaatttgaaa aattaagtga |
| | tgaagaaaaa |
| 601 | attaagcgat ataaaaaaga cgagcaacgg gagaattttg |
| | tcggtttggt |
| 651 | tgctgacagg gtaaaaaagg atggaactaa caaatatatc |
| | atcttctata |
| 701 | cggacaaacc acctactcgt tctgcacggt cgaggaggtc |
| | gcttccggcc |
| 751 | gagattccgc tgattcccgt caatcaggcc gatacgctga |
| | ttgtggatgg |
| 801 | ggaagcggtc agcctgacgg ggcattccgg caatatcttc |
| | gcgcccgaag |
| 851 | ggaattaccg gtatctgact tacggggcgg aaaaattgcc |
| | cggcggatcg |
| 901 | tatgccctcc gtgtgcaagg cgaaccggca aaaggcgaaa |
| | tgcttgttgg |
| 951 | cacggccgtg tacaacggcg aagtgctgca tttccatatg |
| | gaaaacggcc |
| 1001 | gtccgtaccc gtccggaggc aggtttgccg caaaagtcga |
| | tttcggcagc |
| 1051 | aaatctgtgg acggcattat cgacagcggc gatgatttgc |
| | atatgggtac |
| 1101 | gcaaaaattc aaagccgcca tcgatggaaa cggctttaag |
| | gggacttgga |
| 1151 | cggaaaatgg cggcggggat gtttccggaa ggttttacgg |
| | cccggccggc |
| 1201 | gaggaagtgg cgggaaaata cagctatcgc ccgacagatg |
| | ctgaaaaggg |
| 1251 | cggattcggc gtgtttgccg gcaaaaaaga tcgggattga |

[0352] This corresponds to the amino acid sequence <SEQ ID 71; ORF 287.ng>:

| g287.pep | | |
|---|---|---|
| | 1 | MFKRSVIAMA CIFPLSACGG GGGGSPDVKS ADTPSKPAAP VVAENAGEGV |
| | 51 | LPKEKKDEEA AGGAPQADTQ DATAGEGSQD MAAVSAENTG NGGAATTDNP |
| | 101 | KNEDAGAQND MPQNAAESAN QTGNNQPAGS SDSAPASNPA PANGGSDFGR |
| | 151 | TNVGNSVVID GPSQNITLTH CKGDSCNGDN LLDEEAPSKS EFEKLSDEEK |
| | 201 | IKRYKKDEQR ENFVGLVADR VKKDGTNKYI IFYTDKPPTR SARSRRSLPA |
| | 251 | EIPLIPVNQA DTLIVDGEAV SLTGHSGNIF APEGNYRYLT YGAEKLPGGS |
| | 301 | YALRVQGEPA KGEMLVGTAV YNGEVLHFHM ENGRPYPSGG RFAAKVDFGS |
| | 351 | KSVDGIIDSG DDLHMGTQKF KAAIDGNGFK GTWTENGGGD VSGRFYGPAG |
| | 401 | EEVAGKYSYR PTDAEKGGFG VFAGKKDRD* |

| | |
|---|---|
| m287/g287 | ORFs 287 and 287.ng showed a 70.1% identity in 499 aa overlap |
| | 10 20 30 40 49 |
| m287.pep | MFKRSVIAMACIFALSACGGGGGGSPDVKSADTLSKPAAPVVSE-----------KETEA |
| | \|\|\|\|\|\|\|\|\|\|\|\|\| \|\|\|\|\|\|\|\|\|\|\|\|\|\|\|\|\|\|\| \|\|\|\|\|\|\|\|:\| \|:\|\| |
| g287 | MFKRSVIAMACIFPLSACGGGGGGSPDVKSADTPSKPAAPVVAENAGEGVLPKEKKDEEA |
| | 10 20 30 40 50 60 |
| | 50 60 70 80 90 100 109 |
| m287.pep | KEDAPQAGSQGQGAPSAQGSQDMAAVSEENTGNGGAVTADNPKNEDEVAQNDMPQNAAGT |
| | \|\|\|\| :\| \| :::\|\|\|\|\|\|\|\|\| \|\|\|\|\|\|\|\|:\|:\|\|\|\|\|\|\| \|\|\|\|\|\|\|\|\|\| |
| g287 | AGGAPQADTQD--ATAGEGSQDMAAVSAENTGNGGAATTDNPKNEDAGAQNDMPQNAA-- |
| | 70 80 90 100 110 |
| | 110 120 130 140 150 160 169 |
| m287.pep | DSSTPNHTPDPNMLAGNMENQATDAGESSQPANQPDMANAADGMQGDDPSAGGQNAGNTA |
| g287 | ------------------------------------------------------------ |
| | 170 180 190 200 210 220 229 |
| m287.pep | AQGANQAGNNQAAGSSDPIPASNPAPANGGSNFGRVDLANGVLIDGPSQNITLTHCKGDS |
| | ::\|\|\|:\|\|\|\| \|\|\|\|\| \|\|\|\|\|\|\|\|\|\|\|\|:\|\|\|::::\|:\|:\|\|\|\|\|\|\|\|\|\|\|\|\|\|\|\|\| |
| g287 | -ESANQTGNNQPAGSSDSAPASNPAPANGGSDFGRTNVGNSVVIDGPSQNITLTHCKGDS |
| | 120 130 140 150 160 170 |
| | 230 240 250 260 270 280 289 |
| m287.pep | CSGNNFLDEEVQLKSEFEKLSDADKISNYKKDGKNDKFVGLVADSVQMKGINQYIIFYKP |
| | \|:\|:\|:\|\|\|\|: \|\|\|\|\|\|\|\|\| :\|\|: \|\|\|\| : ::\|\|\|\|\|\|\| \|: \| \|:\|\|\|\| |
| g287 | CNGDNLLDEEAPSKSEFEKLSDEEKIKRYKKDEQRENFVGLVADRVKKDGTNKYIIFYTD |
| | 180 190 200 210 220 230 |
| | 290 300 310 320 330 340 349 |
| m287.pep | KPTSFARFRRSARSRRSLPAEMPLIPVNQADTLIVDGEAVSLTGHSGNIFAPEGNYRYLT |
| | \|\|: \|\|\|\|\|\|\|\|\|\|\|\|:\|\|\|\|\|\|\|\|\|\|\|\|\|\|\|\|\|\|\|\|\|\|\|\|\|\|\|\|\|\|\|\|\|\|\|\|\|\| |
| g287 | KPPT-----RSARSRRSLPAEIPLIPVNQADTLIVDGEAVSLTGHSGNIFAPEGNYRYLT |
| | 240 250 260 270 280 290 |
| | 350 360 370 380 390 400 409 |
| m287.pep | YGAEKLPGGSYALRVQGEPAKGEMLAGAAVYNGEVLHFHTENGRPYPTRGRFAAKVDFGS |
| | \|\|\|\|\|\|\|\|\|\|\|\|\|\|\|\|\|\|\|\|\|\|\|\|\|:\|:\|\|\|\|\|\|\|\|\|\|\| \|\|\|\|\|\|\|: \|\|\|\|\|\|\|\|\|\|\| |
| g287 | YGAEKLPGGSYALRVQGEPAKGEMLVGTAVYNGEVLHFHMENGRPYPSGGRFAAKVDFGS |
| | 300 310 320 330 340 350 |
| | 410 420 430 440 450 460 469 |
| m287.pep | KSVDGIIDSGDDLHMGTQKFKAAIDGNGFKGTWTENGSGDVSGKFYGPAGEEVAGKYSYR |
| | \|\|\|\|\|\|\|\|\|\|\|\|\|\|\|\|\|\|\|\|\|\|\|\|\|\|\|\|\|\|\|\|\|\|\|\|\|:\|\|\|\|\|:\|\|\|\|\|\|\|\|\|\|\|\|\|\|\|\| |
| g287 | KSVDGIIDSGDDLHMGTQKFKAAIDGNGFKGTWTENGGGDVSGRFYGPAGEEVAGKYSYR |
| | 360 370 380 390 400 410 |
| | 470 480 489 |
| m287.pep | PTDAEKGGFGVFAGKKEQDX |
| | \|\|\|\|\|\|\|\|\|\|\|\|\|\|\|\|::\|\| |
| g287 | PTDAEKGGFGVFAGKKDRDX |
| | 420 430 |

[0353] The following partial DNA sequence was identified in N. meningitidis <SEQ ID 72>:

a287.seq

| | |
|---|---|
| 1 | ATGTTTAAAC GCAGTGTGAT TGCAATGGCT TGTATTGTTG |
| | CCCTTTCAGC |
| 51 | CTGTGGGGGC GGCGGTGGCG GATCGCCCGA TGTTAAGTCG |
| | GCGGACACGC |
| 101 | TGTCAAAACC TGCCGCCCCT GTTGTTACTG AAGATGTCGG |
| | GGAAGAGGTG |
| 151 | CTGCCGAAAG AAAAGAAAGA TGAGGAGGGG GTGAGTGGTG |
| | CGCCGCAAGC |
| 201 | CGATACGCAG GACGCAACCG CCGGAAAAGG CGGTCAAGAT |
| | ATGGCGGCAG |
| 251 | TTTCGGCAGA AAATACAGGC AATGGCGGTG CGGCAACAAC |
| | GGATAATCCC |
| 301 | GAAAATAAAG ACGAGGGACC GCAAAATGAT ATGCCGCAAA |
| | ATGCCGCCGA |
| 351 | TACAGATAGT TCGAGACCGA ATCACAGCCC TGCACCGAAT |
| | ATGCCAACCA |
| 401 | GAGATATGGG AAACCAAGCA CCGGATGCCG GGGAATCGGC |
| | ACAACCGGCA |
| 451 | AACCAACCGG ATATGGCAAA TGCGGCGGAC GGAATGCAGG |
| | GGGACGATCC |
| 501 | GTCGGCAGGG GAAAATGCCG GCAATACGGC AGATCAAGCT |
| | GCAAATCAAG |
| 551 | CTGAAAACAA TCAAGTCGGC GGCTGTCAAA ATCCTGGCTG |
| | TTGAACCAAT |
| 601 | CCTAACGCCA CGAATGGCGG CAGCGATTTT GGAAGGATAA |
| | ATGTAGCTAA |
| 651 | TGGCATCAAG CTTGACAGCG GTTCGGAAAA TGTAACGTTG |
| | ACACATTGTA |
| 701 | AAGACAAAGT ATGCGATAGA GATTTCTTAG ATGAAGAAGC |
| | ACCACCAAAA |
| 751 | TGAGAATTTG AAAAATTAAG TGATGAAGAA AAAATTAATA |
| | AATATAAAAA |
| 801 | AGACGAGCAA CGAGAGAATT TTGTCGGTTT GGTTGCTGAC |
| | AGGGTAGAAA |
| 851 | AGAATGGAAC TAACAAATAT GTCATCATTT ATAAAGACAA |
| | GTCCGCTTCA |
| 901 | TCTTCATCTG CGCGATTCAG GCGTTCTGCA CGGTCGAGGC |
| | GGTCGCTTCC |
| 951 | GGCCGAGATG CCGCTGATTC CCGTCAATCA GGCGGATACG |
| | CTGATTGTCG |
| 1001 | ATGGGGAAGC GGTCAGCCTG ACGGGGGATT CCGGCAATAT |
| | CTTCGCGCCC |
| 1051 | GAAGGGAATT ACCGGTATCT GACTTACGGG GCGGAAAAAT |
| | TGTCCGGCGG |
| 1101 | ATCGTATGCC CTCAGTGTGC AAGGCGAACC GGCAAAAGGC |
| | GAAATGCTTG |
| 1151 | CGGGCACGGC GGTGTACAAC GGCGAAGTGC TGCATTTCCA |
| | TATGGAAAAC |
| 1201 | GGGCGTCCGT CCCCGTCCGG AGGCAGGTTT GCCGCAAAAG |
| | TCGATTTCGG |
| 1251 | CAGCAAATCT GTGGACGGCA TTATCGACAG CGGCGATGAT |
| | TTGCATATGG |
| 1301 | GTACGCAAAA ATTCAAAGCC GTTATCGATG GAAACGGCTT |
| | TAAGGGGACT |
| 1351 | TGGACGGAAA ATGGCGGCGG GGATGTTTCC GGAAGGTTTT |
| | ACGGCCCGGC |
| 1401 | CGGCGAAGAA GTGGCGGGAA AATACAGCTA TCGCCCGACA |
| | GATGCGGAAA |
| 1451 | AGGGCGGATT CGGCGTGTTT GCCGGCAAAA AAGAGCAGGA |
| | TTGA |

[0354] This corresponds to the amino acid sequence <SEQ ID 73; ORF 287.a>:

| a287.pep | | |
|---|---|---|
| | 1 | MFKRSVIAMA CIVALSACGG GGGGSPDVKS ADTLSKPAAP VVTEDVGEEV |
| | 51 | LPKEKKDEEA VSGAPQADTQ DATAGKGGQD MAAVSAENTG NGGAATTDNP |
| | 101 | ENKDEGPQND MPQNAADTDS STPNHTPAPN MPTRDMGNQA PDAGESAQPA |
| | 151 | NQPDMANAAD GMQGDDPSAG ENAGNTADQA ANQAENNQVG GSQNPASSTN |
| | 201 | PNATNGGSDF GRINVANGIK LDSGSENVTL THCKDKVCDR DFLDEEAPPK |
| | 251 | SEFEKLSDEE KINKYKKDEQ RENFVGLVAD RVEKNGTNKY VIIYKDKSAS |
| | 301 | SSSARFRRSA RSRRSLPAEM PLIPVNQADT LIVDGEAVSL TGHSGNIFAP |
| | 351 | EGNYRYLTYG AEKLSGGSYA LSVQGEPAKG EMLAGTAVYN GEVLHFHMEN |
| | 401 | GRPSPSGGRF AAKVDFGSKS VDGIIDSGDD LHMGTQKFKA VIDGNGFKGT |
| | 451 | WTENGGGDVS GRFYGPAGEE VAGKYSYRPT DAEKGGFGVF AGKKEQD* |

| | |
|---|---|
| m287/a287 | ORFs 287 and 287.a showed a 77.2% identity in 501 aa overlap |
| | 10 20 30 40 49 |
| m287.pep | MFKRSVIAMACIFALSACGGGGGGSPDVKSADTLSKPAAPVVSE-----------KETEA |
| | \|\|\|\|\|\|\|\|\|\|\|\| \|\|\|\|\|\|\|\|\|\|\|\|\|\|\|\|\|\|\|\|\|\|\|\|\|\|\|\|\|:\| \|: \|\| |
| a287 | MFKRSVIAMACIVALSACGGGGGGSPDVKSADTLSKPAAPVVTEDVGEEVLPKEKKDEEA |
| | 10 20 30 40 50 60 |
| | 50 60 70 80 90 100 109 |
| m287.pep | KEDAPQAGSQGQGAPSAQGSQDMAAVSEENTGNGGAVTADNPKNEDEVAQNDMPQNAAGT |
| | \|\|\|\| :\| \|:::\|:\|\|\|\|\|\|\| \|\|\|\|\|\|\|\|:\|:\|\|\|:\|:\|\| \|\|\|\|\|\|\|\|\| \| |
| a287 | VSGAPQADTQ--DATAGKGGQDMAAVSAENTGNGGAATTDNPENKDEGPQNDMPQNAADT |
| | 70 80 90 100 110 |
| | 110 120 130 140 150 160 169 |
| m287.pep | DSSTPNHTPDPNMLAGNMENQATDAGESSQPANQPDMANAADGMQGDDPSAGGQNAGNTA |
| | \|\|\|\|\|\|\|\|\| \|\|\| : : \|\|\| \|\|\|\|\|:\|\|\|\|\|\|\|\|\|\|\|\|\|\|\|\|\|\|\|\|\|\|\| :\|\|\|\|\|\| |
| a287 | DSSTPNHTPAPNMPTRDMGNQAPDAGESAQPANQPDMANAADGMQGDDPSAG-ENAGNTA |
| | 120 130 140 150 160 170 |
| | 170 180 190 200 210 220 229 |
| m287.pep | AQGANQAGNNQAAGSSDPIPASNIPAPANGGSNFGRVDLANGVLIDGPSQNITLTHCKGDS |
| | \|:\|\|\|\| \|\|\|::\|\|::\| ::\|\| :\|\|\|\|:\|\|\|:::\|\|\|: :\|: \|:\|:\|\|\|\|\|\| |
| a287 | DQAANQAENNQVGGSQNPASSTNPNATNGGSDFGRINVANGIKLDSGSENVTLTHCKDKV |
| | 180 190 200 210 220 230 |
| | 230 240 250 260 270 280 289 |
| m287.pep | CSGNNFLDEEVQLKSEFEKLSDADKISNYKKDGKNDKFVGLVADSVQMKGINQYIIFYKP |
| | \|: :\|\|\|\|\|: \|\|\|\|\|\|\|\|\| :\|\|::\|\|\|\| : ::\|\|\|\|\|\|\| \|: :\| \|:\|:\|:\|\| |
| a287 | CD-RDFLDEEAPPKSEFEKLSDEEKINKYKKDEQRENFVGLVADRVEKNGTNKYVIIYKD |
| | 240 250 260 270 280 290 |
| | 290 300 310 320 330 340 |
| m287.pep | KLP--TSFARFRRSARSRRSLPAEMPLIPVNQADTLIVDGEAVSLTGHSGNIFAPEGNYRY |
| | \| :\| \|\|\|\|\|\|\|\|\|\|\|\|\|\|\|\|\|\|\|\|\|\|\|\|\|\|\|\|\|\|\|\|\|\|\|\|\|\|\|\|\|\|\|\|\|\|\|\|\|\|\|\|\| |
| a287 | KSASSSSARFRRSARSRRSLPAEMPLIPVNQADTLIVDGEAVSLTGHSGNIFAPEGNYRY |
| | 300 310 320 330 340 350 |
| | 350 360 370 380 390 400 |
| m287.pep | LTYGAEKLPGGSYALRVQGEPAKGEMLAGAAVYNGEVLHFHTENGRPYPTRGRFAAKVDF |
| | \|\|\|\|\|\|\|\| \|\|\|\|\|\| \|\|\|\|\|\|\|\|\|\|\|\|:\|\|\|\|\|\|\|\|\|\|\| \|\|\|\|\| \|: \|\|\|\|\|\|\|\|\|\| |
| a287 | LTYGAEKLSGGSYALSVQGEPAKGEMLAGTAVYNGEVLHFHMENGRPSPSGGRFAAKVDF |
| | 360 370 380 390 400 410 |
| | 410 420 430 440 450 460 |
| m287.pep | GSKSVDGIIDSGDDLHMGTQKFKAAIDGNGFKGTWTENGSGDVSGKFYGPAGEEVAGKYS |
| | \|\|\|\|\|\|\|\|\|\|\|\|\|\|\|\|\|\|\|\|\|\|\|:\|\|\|\|\|\|\|\|\|\|\|\|\|\|:\|\|\|\|\|:\|\|\|\|\|\|\|\|\|\|\|\|\|\|\| |
| a287 | GSKSVDGIIDSGDDLHMGTQKFKAVIDGNGFKGTWTENGGGDVSGRFYGPAGEEVAGKYS |
| | 420 430 440 450 460 470 |
| | 470 480 489 |
| m287.pep | YRPTDAEKGGFGVFAGKKEQDX |
| | \|\|\|\|\|\|\|\|\|\|\|\|\|\|\|\|\|\|\|\|\|\| |
| a287 | YRPTDAEKGGFGVFAGKKEQDX |
| | 480 490 |
| 406 | |

[0355] The following partial DNA sequence was identified in N. meningitidis <SEQ ID 74>:

m406.seq

| | |
|---|---|
| 1 | ATGCAAGCAC GGCTGCTGAT ACCTATTCTT TTTTCAGTTT |
| | TTATTTTATC |
| 51 | CGCCTGCGGG ACACTGACAG GTATTCCATC GCATGGCGGA |
| | GGTAAACGCT |
| 101 | TTGCGGTCGA ACAAGAACTT GTGGCCGCTT CTGCCAGAGC |
| | TGCCGTTAAA |
| 151 | GACATGGATT TACAGGCATT ACACGGACGA AAAGTTGCAT |
| | TGTACATTGC |
| 201 | CACTATGGGC GACCAAGGTT CAGGCAGTTT GACAGGGGGT |
| | CGCTACTCCA |
| 251 | TTGATGCACT GATTCGTGGC GAATACATAA ACAGCCCTGC |
| | CGTCCGTACC |
| 301 | GATTACACCT ATCCACGTTA CGAAACCACC GCTGAAACAA |
| | CATCAGGCGG |
| 351 | TTTGACAGGT TTAACCACTT CTTTATCTAC ACTTAATGCC |
| | CCTGCACTCT |
| 401 | CTCGCACCCA ATCAGACGGT AGCGGAAGTA AAAGCAGTCT |
| | GGGCTTAAAT |
| 451 | ATTGGCGGGA TGGGGGATTA TCGAAATGAA ACCTTGACGA |
| | CTAACCCGCG |
| 501 | CGACACTGCC TTTCTTTCCC ACTTGGTACA GACCGTATTT |
| | TTCCTGCGCG |
| 551 | GCATAGACGT TGTTTCTCCT GCCAATGCCG ATACAGATGT |
| | GTTTATTAAC |
| 601 | ATCGACGTAT TCGGAACGAT ACGCAACAGA ACCGAAATGC |
| | ACCTATACAA |
| 651 | TGCCGAAACA CTGAAAGCCC AAACAAAACT GGAATATTTC |
| | GCAGTAGACA |
| 701 | GAACCAATAA AAAATTGCTC ATCAAACCAA AAACCAATGC |
| | GTTTGAAGCT |
| 751 | GCCTATAAAG AAAATTACGC ATTGTGGATG GGGCCGTATA |
| | AAGTAAGCAA |
| 801 | AGGAATTAAA CCGACGGAAG GATTAATGGT CGATTTCTCC |
| | GATATCCGAC |
| 851 | CATACGGCAA TCATACGGGT AACTCCGCCC CATCCGTAGA |
| | GGCTGATAAC |
| 901 | AGTCATGAGG GGTATGGATA CAGCGATGAA GTAGTGCGAC |
| | AACATAGACA |
| 951 | AGGACAACCT TGA |

[0356] This corresponds to the amino acid sequence <SEQ ID 75; ORF 406>:

m406.pep

| | |
|---|---|
| 1 | MQARLLIPIL FSVFILSACG TLTGIPSHGG GKRFAVEQEL |
| | VAASARAAVK |
| 51 | DMDLQALHGR KVALYIATMG DQGSGSLTGG RYSIDALIRG |
| | EYINSPAVRT |
| 101 | DYTYPRYETT AETTSGGLTG LTTSLSTLNA PALSRTQSDG |
| | SGSKSSLGLN |
| 151 | IGGMGDYRNE TLTTNPRDTA FLSHLVQTVF FLRGIDVVSP |
| | ANADTDVFIN |
| 201 | IDVFGTIRNR TEMHLYNAET LKAQTKLEYF AVDRTNKKLL |
| | IKPKTNAFEA |
| 251 | AYKENYALWM GPYKVSKGIK PTEGLMVDFS DIRPYGNHTG |
| | NSAPSVEADN |
| 301 | SHEGYGYSDE VVRQHRQGQP * |

[0357] The following partial DNA sequence was identified in N. gonorrhoeae <SEQ ID 76>:

g406.seq

| | |
|---|---|
| 1 | ATGCGGGCAC GGCTGCTGAT ACCTATTCTT TTTTCAGTTT |
| | TTATTTTATC |
| 51 | CGCCTGCGGG ACACTGACAG GTATTCCATC GCATGGCGGA |
| | GGCAAACGCT |
| 101 | TCGCGGTCGA ACAAGAACTT GTGGCCGCTT CTGCCAGAGC |
| | TGCCGTTAAA |
| 151 | GACATGGATT TACAGGCATT ACACGGACGA AAAGTTGCAT |
| | TGTACATTGC |
| 201 | AACTATGGGC GACCAAGGTT CAGGCAGTTT GACAGGGGGT |
| | CGCTACTCCA |
| 251 | TTGATGCACT GATTCGCGGC GAATACATAA ACAGCCCTGC |
| | CGTCCGCACC |
| 301 | GATTACACCT ATCCGCGTTA CGAAACCACC GCTGAAACAA |
| | CATCAGGCGG |
| 351 | TTTGACGGGT TTAACCACTT CTTTATCTAC ACTTAATGCC |
| | CCTGCACTCT |
| 401 | CGCGCACCCA ATCAGACGGT AGCGGAAGTA GGAGCAGTCT |
| | GGGCTTAAAT |
| 451 | ATTGGCGGGA TGGGGGATTA TCGAAATGAA ACCTTGACGA |
| | CCAACCCGCG |
| 501 | CGACACTGCC TTTCTTTCCC ACTTGGTGCA GACCGTATTT |
| | TTCCTGCGCG |
| 551 | GCATAGACGT TGTTTCTCCT GCCAATGCCG ATACAGATGT |
| | GTTTATTAAC |
| 601 | ATCGACGTAT TCGGAACGAT ACGCAACAGA ACCGAAATGC |
| | ACCTATACAA |
| 651 | TGCCGAAACA CTGAAAGCCC AAACAAAACT GGAATATTTC |
| | GCAGTAGACA |
| 701 | GAACCAATAA AAAATTGCTC ATCAAACCCA AAACCAATGC |
| | GTTTGAAGCT |
| 751 | GCCTATAAAG AAAATTACGC ATTGTGGATG GGGCCGTATA |
| | AAGTAAGCAA |
| 801 | AGGAATCAAA CCGACGGAAG GATTGATGGT CGATTTCTCC |
| | GATATCCAAC |
| 851 | CATACGGCAA TCATACGGGT AACTCCGCCC CATCCGTAGA |
| | GGCTGATAAC |
| 901 | AGTCATGAGG GGTATGGATA CAGCGATGAA GCAGTGCGAC |
| | AACATAGACA |
| 951 | AGGGCAACCT TGA |

[0358] This corresponds to the amino acid sequence <SEQ ID 77; ORF 406.ng>:

g406.pep

| | |
|---|---|
| 1 | MRARLLIPIL FSVFILSACG TLTGIPSHGG GKRFAVEQEL |
| | VAASARAAVK |
| 51 | DMDLQALHGR KVALYIATMG DQGSGSLTGG RYSIDALIRG |
| | EYINSPAVRT |
| 101 | DYTYPRYETT AETTSGGLTG LTTSLSTLNA PALSRTQSDG |
| | SGSRSSLGLN |
| 151 | IGGMGDYRNE TLTTNPRDTA FLSHLVQTVF FLRGIDVVSP |
| | ANADTDVFIN |
| 201 | IDVFGTIRNR TEMHLYNAET LKAQTKLEYF AVDRTNKKLL |
| | IKPKTNAFEA |
| 251 | AYKENYALWM GPYDVSKGIK PTEGLMVDFS DIQPYGNHTG |
| | NSAPSVEADN |
| 301 | SHEGYGYSDE AVRQHRQGQP * |

[0359] ORF 406.ng shows 98.8% identity over a 320 aa overlap with a predicted ORF (ORF406.a) from N. gonorrhoeae:

| g406/m406 | |
|---|---|
| | 10 20 30 40 50 60 |
| g406.pep | MRARLLIPILFSVFILSACGTLTGIPSHGGGKRFAVEQELVAASARAAVKDMDLQALHGR |
| | \|:\|\|\|\|\|\|\|\|\|\|\|\|\|\|\|\|\|\|\|\|\|\|\|\|\|\|\|\|\|\|\|\|\|\|\|\|\|\|\|\|\|\|\|\|\|\|\|\|\|\|\|\|\|\|\|\|\|\| |
| m406 | MQARLLIPILFSVFILSACGTLTGIPSHGGGKRFAVEQELVAASARAAVKDMDLQALHGR |
| | 10 20 30 40 50 60 |
| | 70 80 90 100 110 120 |
| g406.pep | KVALYIATMGDQGSGSLTGGRYSIDALIRGEYINSPAVRTDYTYPRYETTAETTSGGLTG |
| | \|\|\|\|\|\|\|\|\|\|\|\|\|\|\|\|\|\|\|\|\|\|\|\|\|\|\|\|\|\|\|\|\|\|\|\|\|\|\|\|\|\|\|\|\|\|\|\|\|\|\|\|\|\|\|\|\|\|\|\| |
| m406 | KVALYIATMGDQGSGSLTGGRYSIDALIRGEYINSPAVRTDYTYPRYETTAETTSGGLTG |
| | 70 80 90 100 110 120 |
| | 130 140 150 160 170 180 |
| g406.pep | LTTSLSTLNAPALSRTQSDGSGSRSSLGLNIGGMGDYRNETLTTNPRDTAFLSHLVQTVF |
| | \|\|\|\|\|\|\|\|\|\|\|\|\|\|\|\|\|\|\|\|\|\|\|:\|\|\|\|\|\|\|\|\|\|\|\|\|\|\|\|\|\|\|\|\|\|\|\|\|\|\|\|\|\|\|\|\|\|\|\| |
| m406 | LTTSLSTLNAPALSRTQSDGSGSKSSLGLNIGGMGDYRNETLTTNPRDTAFLSHLVQTVF |
| | 130 140 150 160 170 180 |
| | 190 200 210 220 230 240 |
| g406.pep | FLRGIDVVSPANADTDVFINIDVFGTIRNRTEMHLYNAETLKAQTKLEYFAVDRTNKKLL |
| | \|\|\|\|\|\|\|\|\|\|\|\|\|\|\|\|\|\|\|\|\|\|\|\|\|\|\|\|\|\|\|\|\|\|\|\|\|\|\|\|\|\|\|\|\|\|\|\|\|\|\|\|\|\|\|\|\|\|\|\| |
| m406 | FLRGIDVVSPANADTDVFINTDVFGTIRNRTEMHLYNAETLKAQTKLEYFAVDRTNKKLL |
| | 190 200 210 220 230 240 |
| | 250 260 270 280 290 300 |
| g406.pep | IKPKTNAFEAAYKENYALWMGPYKVSKGIKPTEGLMVDFSDIQPYGNHTGNSAPSVEADN |
| | \|\|\|\|\|\|\|\|\|\|\|\|\|\|\|\|\|\|\|\|\|\|\|\|\|\|\|\|\|\|\|\|\|\|\|\|\|\|\|\|\|\|:\|\|\|\|\|\|\|\|\|\|\|\|\|\|\|\|\| |
| m406 | IKPKTNAFEAAYKENYALWMGPYKVSKGIKPTEGLMVDFSDIRPYGNHTGNSAPSVEADN |
| | 250 260 270 280 290 300 |
| | 310 320 |
| g406.pep | SHEGYGYSDEAVRQHRQGQPX |
| | \|\|\|\|\|\|\|\|\|\|:\|\|\|\|\|\|\|\|\|\| |
| m406 | SHEGYGYSDEVVRQHRQGQPX |
| | 310 320 |

[0360] The following partial DNA sequence was identified in N. meningitidis <SEQ ID 78>:

a406.seq

| | |
|---|---|
| 1 | ATGCAAGCAC GGCTGCTGAT ACCTATTCTT TTTTCAGTTT |
| | TTATTTTATC |
| 51 | CGCCTGCGGG ACACTGACAG GTATTCCATC GCATGGCGGA |
| | GGTAAACGCT |
| 101 | TCGCGGTCGA ACAAGAACTT GTGGCCGCTT CTGCCAGAGC |
| | TGCCGTTAAA |
| 151 | GACATGGATT TACAGGCATT ACACGGACGA AAAGTTGCAT |
| | TGTACATTGC |
| 201 | AACTATGGGC GACCAAGGTT CAGGCAGTTT GACAGGGGGT |
| | CGCTACTCCA |
| 251 | TTGATGCACT GATTCGTGGC GAATACATAA ACAGCCCTGC |
| | CGTCCGTACC |
| 301 | GATTACACCT ATCCACGTTA CGAAACCACC GCTGAAACAA |
| | CATCAGGCGG |
| 351 | TTTGACAGGT TTAACCACTT CTTTATCTAC ACTTAATGCC |
| | CCTGCACTCT |
| 401 | CGCGCACCCA ATCAGACGGT AGCGGAAGTA AAAGCAGTCT |
| | GGGCTTAAAT |
| 451 | ATTGGCGGGA TGGGGGATTA TCGAAATGAA ACCTTGACGA |
| | CTAACCCGCG |
| 501 | CGACACTGCC TTTCTTTCCC ACTTGGTACA GACCGTATTT |
| | TTCCTGCGCG |
| 551 | GCATAGACGT TGTTTCTCCT GCCAATGCCG ATACGGATGT |
| | GTTTATTAAC |
| 601 | ATCGACGTAT TCGGAACGAT ACGCAACAGA ACCGAAATGC |
| | ACGTATACAA |
| 651 | TGCCGAAACA CTGAAAGCCC AAACAAAACT GGAATATTTC |
| | GCAGTAGACA |
| 701 | GAACCAATAA AAAATTGCTC ATCAAACCAA AAACCAATGC |
| | GTTTGAAGCT |
| 751 | GCCTATAAAG AAAATTACGC ATTGTGGATG GGACCGTATA |
| | AAGTAAGCAA |
| 801 | AGGAATTAAA GCGACAGAAG GATTAATGGT CGATTTCTCC |
| | GATATCCAAC |
| 851 | CATACGGGAA TCATATGGGT AACTCTGCCC GATCCGTAGA |
| | GGCTGATAAC |
| 901 | AGTCATGAGG GGTATGGATA CAGCGATGAA GCAGTGCGAC |
| | GACATAGACA |
| 951 | AGGGCAACCT TGA |

[0361] This corresponds to the amino acid sequence <SEQ ID 79; ORF 406.a>:

| a406.pep | | |
|---|---|---|
| | 1 | MQARLLIPIL FSVFILSACG TLTGIPSHGG GKRFAVEQEL VAASARAAVK |
| | 51 | DMDLQALHGR KVALYIATMG DQGSGSLTGG RYSIDALIRG EYINSPAVRT |
| | 101 | DYTYPRYETT AETTSGGLTG LTTSLSTLNA PALSRTQSDG SGSKSSLGLN |
| | 151 | IGGMGDYRNE TLTTNPRDTA FLSHLVQTVF FLRGIDVVSP ANADTDVFIN |
| | 201 | IDVFGTIRNR TEMHLYNAET LKAQTKLEYF AVDRTNKKLL IKPKTNAFEA |
| | 251 | AYKENYALWM GPYKVSKGIK PTEGLMVDFS DIQPYGNHMG NSAPSVEADN |
| | 301 | SHEGYGYSDE AVRRHRQGQP * |

| | |
|---|---|
| m406/a406 | ORFs 406 and 406.a showed a 98.8% identity in 320 aa overlap |
| | 10 20 30 40 50 60 |
| m406.pep | MQARLLIPILFSVFILSACGTLTGIPSHGGGKRFAVEQELVAASARAAVKDMDLQALHGR |
| | \|\|\|\|\|\|\|\|\|\|\|\|\|\|\|\|\|\|\|\|\|\|\|\|\|\|\|\|\|\|\|\|\|\|\|\|\|\|\|\|\|\|\|\|\|\|\|\|\|\|\|\|\|\|\|\|\|\|\|\| |
| a406 | MQARLLIPILFSVFILSAGGTLTGIPSHGGGKRFAVEQELVAASARAAVKDMDLQALHGR |
| | 10 20 30 40 50 60 |
| | 70 80 90 100 110 120 |
| m406.pep | KVALYIATMGDQGSGSLTGGRYSIDALIRGEYINSPAVRTDYTYPRYETTAETTSGGLTG |
| | \|\|\|\|\|\|\|\|\|\|\|\|\|\|\|\|\|\|\|\|\|\|\|\|\|\|\|\|\|\|\|\|\|\|\|\|\|\|\|\|\|\|\|\|\|\|\|\|\|\|\|\|\|\|\|\|\|\|\|\| |
| a406 | KVALYIATMGDQGSGSLTGGRYSIDALIRGEYINSPAVRTDYTYPRYETTAETTSGGLTG |
| | 70 80 90 100 110 120 |
| | 130 140 150 160 170 180 |
| m406.pep | LTTSLSTLNAPALSRTQSDGSGSKSSLGLNIGGMGDYRNETLTTNPRDTAFLSHLVQTVF |
| | \|\|\|\|\|\|\|\|\|\|\|\|\|\|\|\|\|\|\|\|\|\|\|\|\|\|\|\|\|\|\|\|\|\|\|\|\|\|\|\|\|\|\|\|\|\|\|\|\|\|\|\|\|\|\|\|\|\|\|\| |
| a406 | LTTSLSTLNAPALSRTQSDGSGSKSSLGLNIGGMGDYRNETLTTNPRDTAFLSHLVQTVF |
| | 130 140 150 160 170 180 |
| | 190 200 210 220 230 240 |
| m406.pep | FLRGIDVVSPANADTDVFINIDVFGTIRNRTEMHLYNAETLKAQTKLEYFAVDRTNKKLL |
| | \|\|\|\|\|\|\|\|\|\|\|\|\|\|\|\|\|\|\|\|\|\|\|\|\|\|\|\|\|\|\|\|\|\|\|\|\|\|\|\|\|\|\|\|\|\|\|\|\|\|\|\|\|\|\|\|\|\|\|\| |
| a406 | FLRGIDVVSPANADTDVFINIDVFGTIRNRTEMHLYNAETLKAQTKLEYFAVDRTNKKLL |
| | 190 200 210 220 230 240 |
| | 250 260 270 280 290 300 |
| m406.pep | IKPKTNAFEAAYKENYALWMGPYKVSKGIKPTEGLMVDFSDIRPYGNHTGNSAPSVEADN |
| | \|\|\|\|\|\|\|\|\|\|\|\|\|\|\|\|\|\|\|\|\|\|\|\|\|\|\|\|\|\|\|\|\|\|\|\|\|\|\|\|\|\|:\|\|\|\|\| \|\|\|\|\|\|\|\|\|\|\| |
| a406 | IKLPKTNAFEAAYKENYALWMGPYKVSKGIKPTEGLMVDFSDIQPYGNHMGNSAPSVEAN |
| | 250 260 270 280 290 300 |
| | 310 320 |
| m406.pep | SHEGYGYSDEVVRQHRQGQPX |
| | \|\|\|\|\|\|\|\|\|\|:\|\|:\|\|\|\|\|\|\| |
| a406 | SHEGYGYSDEAVRRHRQGQPX |
| | 310 320 |

[0362] The following partial DNA sequence was identified in N. meningitidis <SEQ ID 80>:

m726.seq

| | |
|---|---|
| 1 | ATGACCATCT ATTTCAAAAA CGGCTTTTAC GAGGACACAT |
| | TGGGCGGCAT |
| 51 | CCCCGAAGGC GCGGTTGCCG TCCGCGCCGA AGAATACGCC |
| | GCCCTTTTGG |
| 101 | CAGGACAGGC GCAGGGCGGG CAGATTGCCG CAGATTCCGA |
| | CGGCCGCCCC |
| 151 | GTTTTAACCC CGCCGCGCCC GTCCGATTAC CACGAATGGG |
| | ACGGCAAAAA |
| 201 | ATGGAAAATC AGCAAAGCCG CCGCCGCCGC CCGTTTCGCC |
| | AAACAAAAAA |
| 251 | CCGCCTTGGC ATTCCGCCTC GCGGAAAAGG CGGACGAACT |
| | CAAAAACAGC |
| 301 | CTCTTGGCGG GCTATCCCCA AGTGGAAATC GACAGCTTTT |
| | ACAGGCAGGA |
| 351 | AAAAGAAGCC CTCGCGCGGC AGGCGGACAA CAACGCCCCG |
| | ACCCCGATGC |
| 401 | TGGCGCAAAT CGCCGCCGCA AGGGGCGTGG AATTGGACGT |
| | TTTGATTGAA |
| 451 | AAAGTTATCG AAAAATCCGC CCGCCTGGCT GTTGCCGCCG |
| | GCGCGATTAT |
| 501 | CGGAAAGCGT CAGCAGCTCG AAGACAAATT GAACACCATC |
| | GAAACCGCGC |
| 551 | CCGGATTGGA CGCGCTGGAA AAGGAAATCG AAGAATGGAC |
| | GCTAAACATC |
| 601 | GGCTGA |

[0363] This corresponds to the amino acid sequence <SEQ ID 81; ORF 726>:

m726.pep

| | |
|---|---|
| 1 | MTIYFKNGFY DDTLGGIPEG AVAVRAEEYA ALLAGQAQGG |
| | QIAADSDGRP |
| 51 | VLTPPRPSDY HEWDGKKWKI SKAAAAARFA KQKTALAFRL |
| | AEKADELKNS |
| 101 | LLAGYPQVEI DSFYRQEKEA LARQADNNAP TPMLAQIAAA |
| | RGVELDVLIE |
| 151 | KVIEKSARLA VAAGAIIGKR QQLEDKLNTI ETAPGLDALE |
| | KEIEEWTLNI |
| 201 | G* |

[0364] The following partial DNA sequence was identified in N. meningitidis <SEQ ID 82>:

m907-2.seq

| | |
|---|---|
| 1 | ATGAGAAAAC CGACCGATAC CCTACCCGTT AATCTGCAAC |
| | GCCGCCGCCT |
| 51 | GTTGTGTGCC GCCGGTGCGT TGTTGCTCAG TCCTCTGGCG |
| | CACGCCGGCG |
| 101 | CGCAACGTGA GGAAACGCTT GCCGACGATG TGGCTTCCGT |
| | GATGAGGAGT |
| 151 | TCTGTCGGCA GCGTCAATCC GCCGAGGCTG GTGTTTGACA |
| | ATCCGAAAGA |
| 201 | GGGCGAGCGT TGGTTGTCTG CCATGTCGGC ACGTTTGGCA |
| | AGGTTCGTCC |
| 251 | CCGAGGAGGA GGAGCGGCGC AGGCTGCTGG TCAATATCCA |
| | GTACGAAAGC |
| 301 | AGCCGGGCCG GTTTGGATAC GCAGATTGTG TTGGGGCTGA |
| | TTGAGGTGGA |
| 351 | AAGCGCGTTC CGCCAGTATG CAATCAGCGG TGTCGGCGCG |
| | CGCGGCCTGA |
| 401 | TGCAGGTTAT GCCGTTTTGG AAAAACTACA TCGGCAAACC |
| | GGCGCACAAC |
| 451 | CTGTTCGACA TCCGCACCAA CCTGCGTTAC GGCTGTACCA |
| | TCCTGCGCCA |
| 501 | TTACCGGAAT CTTGAAAAAG GCAACATCGT CCGCGCGCTT |
| | GCCCGCTTTA |
| 551 | ACGGCAGCTT GGGCAGCAAT AAATATCCGA ACGCCGTTTT |
| | GGGCGCGTGG |
| 601 | CGCAACCGCT GGCAGTGGCG TTGA |

[0365] This corresponds to the amino acid sequence <SEQ ID 83; ORF 907-2>:

m907-2.pep

| | |
|---|---|
| 1 | MRKPTDTLPV NLQRRRLLCA AGALLLSPLA HAGAQREETL |
| | ADDVASVMRS |
| 51 | SVGSVNPPRL VFDNPKEGER WLSAMSARLA RFVPEEEERR |
| | RLLVNIQYES |
| 101 | SRAGLDTQIV LGLIEVESAF RQYAISGVGA RGLMQVMPFW |
| | KNYIGKPAHN |
| 151 | LFDIRTNLRY GCTILRHYRN LEKGNIVRAL ARFNGSLGSN |
| | KYPNAVLGAW |
| 201 | RNRWQWR* |

[0366] The following partial DNA sequence was identified in N. meningitidis <SEQ ID 84>:

m953.seq

| | |
|---|---|
| 1 | ATGAAAAAAA TCATCTTCGC CGCACTCGCA GCCGCCGCCA |
| | TCAGTACTGC |
| 51 | CTCCGCCGCC ACCTACAAAG TGGACGAATA TCACGCCAAC |
| | GCCCGTTTCG |
| 101 | CCATCGACCA TTTCAACACC AGCACCAACG TCGGCGGTTT |
| | TTACGGTCTG |
| 151 | ACCGGTTCCG TCGAGTTCGA CCAAGCAAAA CGCGACGGTA |
| | AAATCGACAT |
| 201 | CACCATCCCC ATTGCCAACC TGCAAAGCGG TTCGCAACAC |
| | TTTACCGACC |
| 251 | ACCTGAAATC AGCCGACATC TTCGATGCCG CCCAATATCC |
| | GGACATCCGC |
| 301 | TTTGTTTCCA CCAAATTCAA CTTCAACGGC AAAAAACTGG |
| | TTTCCGTTGA |
| 351 | CGGCAACCTG ACCATGCACG GCAAAACCGC CCCCGTCAAA |
| | CTCAAAGCCG |
| 401 | AAAAATTCAA CTGCTACCAA AGCCCGATGG AGAAAACCGA |
| | AGTTTGTGGC |
| 451 | GGCGACTTCA GCACCACCAT CGACCGCACC AAATGGGGCA |
| | TGGACTACCT |
| 501 | CGTTAACGTT GGTATGACCA AAAGCGTCCG CATCGACATC |
| | CAAATCGAGG |
| 551 | CAGCCAAACA ATAA |

[0367] This corresponds to the amino acid sequence <SEQ ID 85; ORF 953>:

m953.pep

| | |
|---|---|
| 1 | MKKIIFAALA AAAISTASAA TYKVDEYHAN ARFAIDHFNT |
| | STNVGGFYGL |
| 51 | TGSVEFDQAK RDGKIDITIP IANLQSGSQH FTDHLKSADI |
| | FDAAQYPDIR |
| 101 | FVSTKFNFNG KKLVSVDGNL TMHGKTAPVK LKAEKFNCYQ |
| | SPMEKTEVCG |
| 151 | GDFSTTIDRT KWGMDYLVNV GMTKSVRIDI QIEAAKQ* |

[0368] The following partial DNA sequence was identified in N. meningitidis <SEQ ID 86>:

orf1-1.seq

| | |
|---|---|
| 1 | ATGAAAACAA CCGACAAACG GACAACCGAA ACACACCGCA |
| | AAGCCCCGAA |
| 51 | AACCGGCCGC ATCCGCTTCT CGCCTGCTTA CTTAGCCATA |
| | TGCCTGTCGT |
| 101 | TCGGCATTCT TCCCCAAGCC TGGGCGGGAC ACACTTATTT |
| | CGGCATCAAC |
| 151 | TACCAATACT ATCGCGACTT TGCCGAAAAT AAAGGCAAGT |
| | TTGCAGTCGG |
| 201 | GGCGAAAGAT ATTGAGGTTT ACAACAAAAA AGGGGAGTTG |
| | GTCGGCAAAT |
| 251 | CAATGACAAA AGCCCCGATG ATTGATTTTT CTGTGGTGTC |
| | GCGTAACGGC |
| 301 | GTGGCGGCAT TGGTGGGCGA TCAATATATT GTGAGCGTGG |
| | CACATAACGG |
| 351 | CGGCTATAAC AACGTTGATT TTGGTGCGGA AGGAAGAAAT |
| | CCCGATCAAC |
| 401 | ATCGTTTTAC TTATAAAATT GTGAAACGGA ATAATTATAA |
| | AGCAGGGACT |
| 451 | AAAGGCCATC CTTATGGCGG CGATTATCAT ATGCCGCGTT |
| | TGCATAAATT |
| 501 | TGTCACAGAT GCAGAACCTG TTGAAATGAC CAGTTATATG |
| | GATGGGCGGA |
| 551 | AATATATCGA TCAAAATAAT TACCCTGACC GTGTTCGTAT |
| | TGGGGCAGGC |
| 601 | AGGCAATATT GGCGATCTGA TGAAGATGAG CCCAATAACC |
| | GCGAAAGTTC |
| 651 | ATATCATATT GCAAGTGCGT ATTCTTGGCT CGTTGGTGGC |
| | AATACCTTTG |
| 701 | CACAAAATGG ATCAGGTGGT GGCACAGTCA ACTTAGGTAG |
| | TGAAAAAATT |
| 751 | AAACATAGCC CATATGGTTT TTTACCAACA GGAGGCTCAT |
| | TTGGCGACAG |
| 801 | TGGCTCACCA ATGTTTATCT ATGATGCCCA AAAGCAAAAG |
| | TGGTTAATTA |
| 851 | ATGGGGTATT GCAAACGGGC AACCCCTATA TAGGAAAAAG |
| | CAATGGCTTC |
| 901 | CAGCTGGTTC GTAAAGATTG GTTCTATGAT GAAATCTTTG |
| | CTGGAGATAC |
| 951 | CCATTCAGTA TTCTACGAAC CACGTCAAAA TGGGAAATAC |
| | TCTTTTAACG |
| 1001 | ACGATAATAA TGGCACAGGA AAAATCAATG CCAAACATGA |
| | ACACAATTCT |
| 1051 | CTGCCTAATA GATTAAAAAC ACGAACCGTT CAATTGTTTA |
| | ATGTTTCTTT |
| 1101 | ATCCGAGACA GCAAGAGAAC CTGTTTATCA TGCTGCAGGT |
| | GGTGTCAACA |
| 1151 | GTTATCGACC CAGACTGAAT AATGGAGAAA ATATTTCCTT |
| | TATTGACGAA |
| 1201 | GGAAAAGGCG AATTGATACT TACCAGCAAC ATCAATCAAG |
| | GTGCTGGAGG |
| 1251 | ATTATATTTC CAAGGAGATT TTACGGTCTC GCCTGAAAAT |
| | AACGAAACTT |
| 1301 | GGCAAGGCGC GGGCGTTCAT ATCAGTGAAG ACAGTACCGT |
| | TACTTGGAAA |
| 1351 | GTAAACGGCG TGGCAAACGA CCGCCTGTCC AAAATCGGCA |
| | AAGGCACGCT |
| 1401 | GCACGTTCAA GCCAAAGGGG AAAACCAAGG CTCGATCAGC |
| | GTGGGCGACG |
| 1451 | GTACAGTCAT TTTGGATCAG CAGGCAGACG ATAAAGGCAA |
| | AAAACAAGCC |
| 1501 | TTTAGTGAAA TCGGCTTGGT CAGCGGCAGG GGTACGGTGC |
| | AACTGAATGC |
| 1551 | CGATAATCAG TTCAACCCCG ACAAACTCTA TTTCGGCTTT |
| | CGCGGCGGAC |
| 1601 | GTTTGGATTT AAACGGGCAT TCGCTTTCGT TCCACCGTAT |
| | TCAAAATACC |
| 1651 | GATGAAGGGG CGATGATTGT CAACCACAAT CAAGACAAAG |
| | AATCCACCGT |
| 1701 | TACCATTACA GGCAATAAAG ATATTGCTAC AACCGGCAAT |
| | AACAACAGCT |
| 1751 | TGGATAGCAA AAAAGAAATT GCCTACAACG GTTGGTTTGG |
| | CGAGAAAGAT |
| 1801 | ACGACCAAAA CGAACGGGCG GCTCAACCTT GTTTACCAGC |
| | CCGCCGCAGA |
| 1851 | AGACCGCACC CTGCTGCTTT CCGGCGGAAC AAATTTAAAC |
| | GGCAACATCA |
| 1901 | CGCAAACAAA CGGCAAACTG TTTTTCAGCG GCAGACCAAC |
| | ACCGCACGCC |
| 1951 | TACAATCATT TAAACGACCA TTGGTCGCAA AAAGAGGGCA |
| | TTCCTCGCGG |
| 2001 | GGAAATCGTG TGGGACAACG ACTGGATCAA CCGCACATTT |
| | AAAGCGGAAA |
| 2051 | ACTTCCAAAT TAAAGGCGGA CAGGCGGTGG TTTCCCGCAA |
| | TGTTGCCAAA |
| 2101 | GTGAAAGGCG ATTGGCATTT GAGCAATCAC GCCCAAGCAG |
| | TTTTTGGTGT |
| 2151 | CGCACCGCAT CAAAGCCACA CAATCTGTAC ACGTTCGGAC |
| | TGGACGGGTC |
| 2201 | TGACAAATTG TGTCGAAAAA ACCATTACCG ACGATAAAGT |
| | GATTGCTTCA |
| 2251 | TTGACTAAGA CCGACATCAG CGGCAATGTC GATCTTGCCG |
| | ATCACGCTCA |
| 2301 | TTTAAATCTC ACAGGGCTTG CCACACTCAA CGGCAATCTT |
| | AGTGCAAATG |
| 2351 | GCGATACACG TTATACAGTC AGCCACAACG CCACCCAAAA |
| | CGGCAACCTT |
| 2401 | AGCCTCGTGG GCAATGCCCA AGCAACATTT AATCAAGCCA |
| | CATTAAACGG |
| 2451 | CAACACATCG GCTTCGGGCA ATGCTTCATT TAATCTAAGC |
| | GACCACGCCG |
| 2501 | TACAAAACGG CAGTCTGACG CTTTCCGGCA ACGCTAAGGC |
| | AAACGTAAGC |
| 2551 | CATTCCGCAC TCAACGGTAA TGTCTCCCTA GCCGATAAGG |
| | CAGTATTCCA |
| 2601 | TTTTGAAAGC AGCCGCTTTA CCGGACAAAT CAGCGGCGGC |
| | AAGGATACGG |
| 2651 | CATTACACTT AAAAGACAGC GAATGGACGC TGCCGTCAGG |
| | CACGGAATTA |
| 2701 | GGCAATTTAA ACCTTGACAA CGCCACCATT ACACTCAATT |
| | CCGCCTATCG |
| 2751 | CCACGATGCG GCAGGGGCGC AAACCGGCAG TGCGACAGAT |
| | GCGCCGCGCC |
| 2801 | GCCGTTCGCG CCGTTCGCGC CGTTCCCTAT TATCCGTTAC |
| | ACCGCCAACT |
| 2851 | TCGGTAGAAT CCCGTTTCAA CACGCTGACG GTAAACGGCA |
| | AATTGAACGG |
| 2901 | TCAGGGAACA TTCCGCTTTA TGTCGGAACT CTTCGGCTAC |
| | CGCAGCGACA |
| 2951 | AATTGAAGCT GGCGGAAAGT TCCGAAGGCA CTTACACCTT |
| | GGCGGTCAAC |
| 3001 | AATACCGGCA ACGAACCTGC AAGCCTCGAA CAATTGACGG |
| | TAGTGGAAGG |
| 3051 | AAAAGACAAC AAACCGCTGT CCGAAAACCT TAATTTCACC |
| | CTGCAAAACG |
| 3101 | AACACGTCGA TGCCGGCGCG TGGCGTTACC AACTCATCCG |
| | CAAAGACGGC |
| 3151 | GAGTTCCGCC TGCATAATCC GGTCAAAGAA CAAGAGCTTT |
| | CCGACAAACT |
| 3201 | CGGCAAGGCA GAAGCCAAAA AACAGGCGGA AAAAGACAAC |
| | GCGCAAAGCC |
| 3251 | TTGACGCGCT GATTGCGGCC GGGCGCGATG CCGTCGAAAA |
| | GACAGAAAGC |
| 3301 | GTTGCCGAAC CGGCCCGGCA GGCAGGCGGG GAAAATGTCG |
| | GCATTATGCA |
| 3351 | GGCGGAGGAA GAGAAAAAAC GGGTGCAGGC GGATAAAGAC |
| | ACCGCCTTGG |
| 3401 | CGAAACAGCG CGAAGCGGAA ACCCGGCCGG CTACCACCGC |
| | CTTCCCCCGC |
| 3451 | GCCCGCCGCG CCCGCCGGGA TTTGCCGCAA CTGCAACCCC |
| | AACCGCAGCC |
| 3501 | CCAACCGCAG CGCGACCTGA TCAGCCGTTA TGCCAATAGC |
| | GGTTTGAGTG |
| 3551 | AATTTTCCGC CACGCTCAAC AGCGTTTTCG CCGTACAGGA |
| | CGAATTAGAC |
| 3601 | CGCGTATTTG CCGAAGACCG CCGCAACGCC GTTTGGACAA |
| | GCGGCATCCG |
| 3651 | GGACACCAAA CACTACCGTT CGCAAGATTT CCGCGCCTAC |
| | CGCCAACAAA |
| 3701 | CCGACCTGCG CCAAATCGGT ATGCAGAAAA ACCTCGGCAG |
| | CGGGCGCGTC |
| 3751 | GGCATCCTGT TTTCGCACAA CCGGACCGAA AACACCTTCG |
| | ACGACGGCAT |
| 3801 | CGGCAACTCG GCACGGCTTG CCCACGGCGC CGTTTTCGGG |
| | CAATACGGCA |
| 3851 | TCGACAGGTT CTACATCGGC ATCAGCGCGG GCGCGGGTTT |
| | TAGCAGCGGC |
| 3901 | AGCCTTTCAG ACGGCATCGG AGGCAAAATC CGCCGCCGCG |
| | TGCTGCATTA |
| 3951 | CGGCATTCAG GCACGATACC GCGCCGGTTT CGGCGGATTC |
| | GGCATCGAAC |
| 4001 | CGCACATCGG CGCAACGCGC TATTTCGTCC AAAAAGCGGA |
| | TTACCGCTAC |
| 4051 | GAAAACGTCA ATATCGCCAC CCCCGGCCTT GCATTCAACC |
| | GCTACCGCGC |
| 4101 | GGGCATTAAG GCAGATTATT CATTCAAACC GGCGCAACAC |
| | ATTTCCATCA |
| 4151 | CGCCTTATTT GAGCCTGTCC TATACCGATG CCGCTTCGGG |
| | CAAAGTCCGA |
| 4201 | ACACGCGTCA ATACCGCCGT ATTGGCTCAG GATTTCGGCA |
| | AAACCCGCAG |
| 4251 | TGCGGAATGG GGCGTAAACG CCGAAATCAA AGGTTTCAGG |
| | CTGTCCCTCC |
| 4301 | ACGCTGCCGC CGCCAAAGGC CCGCAACTGG AAGCGCAACA |
| | CAGCGCGGGC |
| 4351 | ATCAAATTAG GCTACCGCTG GTAA |

[0369] This corresponds to the amino acid sequence <SEQ ID 87; ORF orf1-1>:

orf1-1.pep

| | |
|---|---|
| 1 | MKTTDKRTTE THRKAPKTGR IRFSPAYLAI CLSFGILPQA |
| | WAGHTYFGIN |
| 51 | YQYYRDFAEN KGKFAVGAKD IEVYNKKGEL VGKSMTKAPM |
| | IDFSVVSRNG |
| 101 | VAALVGDQYI VSVAHNGGYN NVDFGAEGRN PDQHRFTYKI |
| | VKRNNYKAGT |
| 151 | KGHPYGGDYH MPRLHKFVTD AEPVEMTSYM DGRKYIDQNN |
| | YPDRVRIGAG |
| 201 | RQYWRSDEDE PNNRESSYHI ASAYSWLVGG NTFAQNGSGG |
| | GTVNLGSEKI |
| 251 | KHSPYGFLPT GGSFGDSGSP MFIYDAQKQK WLINGVLQTG |
| | NPYIGKSNGF |
| 301 | QLVRKDWFYD EIFAGDTHSV FYEPRQNGKY SFNDDNNGTG |
| | KINAKHEHNS |
| 351 | LPNRLKTRTV QLFNVSLSET AREPVYHAAG GVNSYRPRLN |
| | NGENISFIDE |
| 401 | GKGELILTSN INQGAGGLYF QGDFTVSPEN NETWQGAGVH |
| | ISEDSTVTWK |
| 451 | VNGVANDRLS KIGKGTLHVQ AKGENQGSIS VGDGTVILDQ |
| | QADDKGKKQA |
| 501 | FSEIGLVSGR GTVQLNADNQ FNPDKLYFGF RGGRLDLNGH |
| | SLSFHRIQNT |
| 551 | DEGAMIVNHN QDKESTVTIT GNKDIATTGN NNSLDSKKEI |
| | AYNGWFGEKD |
| 601 | TTKTNGRLNL VYQPAAEDRT LLLSGGTNLN GNITQTNGKL |
| | FFSGRPTPHA |
| 651 | YNHLNDHWSQ KEGIPRGEIV WDNDWINRTF KAENFQIKGG |
| | QAVVSRNVAK |
| 701 | VKGDWHLSNH AQAVFGVAPH QSHTICTRSD WTGLTNCVEK |
| | TITDDKVIAS |
| 751 | LTKTDISGNV DLADHAHLNL TGLATLNGNL SANGDTRYTV |
| | SHNATQNGNL |
| 801 | SLVGNAQATF NQATLNGNTS ASGNASFNLS DHAVQNGSLT |
| | LSGNAKANVS |
| 851 | HSALNGNVSL ADKAVFHFES SRFTGQISGG KDTALHLKDS |
| | EWTLPSGTEL |
| 901 | GNLNLDNATI TLNSAYRHDA AGAQTGSATD APRRRSRRSR |
| | RSLLSVTPPT |
| 951 | SVESRFNTLT VNGKLNGQGT FRFMSELFGY RSDKLKLAES |
| | SEGTYTLAVN |
| 1001 | NTGNEPASLE QLTVVEGKDN KPLSENLNFT LQNEHVDAGA |
| | WRYQLIRKDG |
| 1051 | EFRLHNPVKE QELSDKLGKA EAKKQAEKDN AQSLDALIAA |
| | GRDAVEKTES |
| 1101 | VAEPARQAGG ENVGIMQAEE EKKRVQADKD TALAKQREAE |
| | TRPATTAFPR |
| 1151 | ARRARRDLPQ LQPQPQPQPQ RDLISRYANS GLSEFSATLN |
| | SVFAVQDELD |
| 1201 | RVFAEDRRNA VWTSGIRDTK HYRSQDFRAY RQQTDLRQIG |
| | MQKNLGSGRV |
| 1251 | GILFSHNRTE NTFDDGIGNS ARLAHGAVFG QYGIDRFYIG |
| | ISAGAGFSSG |
| 1301 | SLSDGIGGKI RRRVLHYGIQ ARYRAGFGGF GIEPHIGATR |
| | YFVQKADYRY |
| 1351 | ENVNIATPGL AFNRYRAGIK ADYSFKPAQH ISITPYLSLS |
| | YTDAASGKVR |
| 1401 | TRVNTAVLAQ DFGKTRSAEW GVNAEIKGFT LSLHAAAAKG |
| | PQLEAQHSAG |
| 1451 | IKLGYRW* |

[0370] The following partial DNA sequence was identified in N. meningitidis <SEQ ID 88>:

orf46-2.seq

| | |
|---|---|
| 1 | TTGGGCATTT CCCGCAAAAT ATCCCTTATT CTGTCCATAC |
| | TGGCAGTGTG |
| 51 | CCTGCCGATG CATGCACACG CCTCAGATTT GGCAAACGAT |
| | TCTTTTATCC |
| 101 | GGCAGGTTCT CGACCGTCAG CATTTCGAAC CCGACGGGAA |
| | ATACCACCTA |
| 151 | TTCGGCAGCA GGGGGGAACT TGCCGAGCGC AGCGGCCATA |
| | TCGGATTGGG |
| 201 | AAAAATACAA AGCCATCAGT TGGGCAACCT GATGATTCAA |
| | CAGGCGGCCA |
| 251 | TTAAAGGAAA TATCGGCTAC ATTGTCCGCT TTTCCGATCA |
| | CGGGCACGAA |
| 301 | GTCCATTCCC CCTTCGACAA CCATGCCTCA CATTCCGATT |
| | CTGATGAAGC |
| 351 | CGGTAGTCCC GTTGACGGAT TTAGCCTTTA CCGCATCCAT |
| | TGGGACGGAT |
| 401 | ACGAACACCA TCCCGCCGAC GGCTATGACG GGCCACAGGG |
| | CGGCGGCTAT |
| 451 | CCCGCTCCCA AAGGCGCGAG GGATATATAC AGCTACGACA |
| | TAAAAGGCGT |
| 501 | TGCCCAAAAT ATCCGCCTCA ACCTGACCGA CAACCGCAGC |
| | ACCGGACAAC |
| 551 | GGCTTGCCGA CCGTTTCCAC AATGCCGGTA GTATGCTGAC |
| | GCAAGGAGTA |
| 601 | GGCGACGGAT TCAAACGCGC CACCCGATAC AGCCCCGAGC |
| | TGGACAGATC |
| 651 | GGGCAATGCC GCCGAAGCCT TCAACGGCAC TGCAGATATC |
| | GTTAAAAACA |
| 701 | TCATCGGCGC GGCAGGAGAA ATTGTCGGCG CAGGCGATGC |
| | CGTGCAGGGC |
| 751 | ATAAGCGAAG GCTCAAACAT TGCTGTCATG CACGGCTTGG |
| | GTCTGCTTTC |
| 801 | CACCGAAAAC AAGATGGCGC GCATCAACGA TTTGGCAGAT |
| | ATGGCGCAAC |
| 851 | TCAAAGACTA TGCCGCAGCA GCCATCCGCG ATTGGGCAGT |
| | CCAAAACCCC |
| 901 | AATGCCGCAC AAGGCATAGA AGCCGTCAGC AATATCTTTA |
| | TGGCAGCCAT |
| 951 | CCCCATCAAA GGGATTGGAG CTGTTCGGGG AAAATACGGC |
| | TTGGGCGGCA |
| 1001 | TCACGGCACA TCCTATCAAG CGGTCGCAGA TGGGCGCGAT |
| | CGCATTGCCG |
| 1051 | AAAGGGAAAT CCGCCGTCAG CGACAATTTT GCCGATGCGG |
| | CATACGCCAA |
| 1101 | ATACCCGTCC CCTTACCATT CCCGAAATAT CCGTTCAAAC |
| | TTGGAGCAGC |
| 1151 | GTTACGGCAA AGAAAACATC ACCTCCTCAA CCGTGCCGCC |
| | GTCAAACGGC |
| 1201 | AAAAATGTCA AACTGGCAGA CCAACGCCAC CCGAAGACAG |
| | GCGTACCGTT |
| 1251 | TGACGGTAAA GGGTTTCCGA ATTTTGAGAA GCACGTGAAA |
| | TATGATACGA |
| 1301 | AGCTCGATAT TCAAGAATTA TCGGGGGGCG GTATACCTAA |
| | GGCTAAGCCT |
| 1351 | GTGTTTGATG CGAAACCGAG ATGGGAGGTT GATAGGAAGC |
| | TTAATAAATT |
| 1401 | GACAACTCGT GAGCAGGTGG AGAAAAATGT TCAGGAAATA |
| | AGGAACGGTA |
| 1451 | ATATAAACAG TAACTTTAGC CAACATGCTC AACTAGAGAG |
| | GGAAATTAAT |
| 1501 | AAACTAAAAT CTGCCGATGA AATTAATTTT GCAGATGGAA |
| | TGGGAAAATT |
| 1551 | TACCGATAGC ATGAATGACA AGGCTTTTAG TAGGCTTGTG |
| | AAATCAGTTA |
| 1601 | AAGAGAATGG CTTCACAAAT CCAGTTGTGG AGTACGTTGA |
| | AATAAATGGA |
| 1651 | AAAGCATATA TCGTAAGAGG AAATAATRGG GTTTTTGCTG |
| | CAGAATACCT |
| 1701 | TGGCAGGATA CATGAATTAA AATTTAAAAA AGTTGACTTT |
| | CCTGTTCCTA |
| 1751 | ATACTAGTTG GAAAAATCCT ACTGATGTCT TGAATGAATC |
| | AGGTAATGTT |
| 1801 | AAGAGACCTC GTTATAGGAG TAAATAA |

[0371] This corresponds to the amino acid sequence <SEQ ID 89; ORF orf46-2>:

orf46-2.pep

| | |
|---|---|
| 1 | LGISRKISLI LSILAVCLPM HAHASDLAND SFIRQVLDRQ |
| | HFEPDGKYHL |
| 51 | FGSRGELAER SGHIGLGKIQ SHQLGNLMIQ QAAIKGNIGY |
| | IVRFSDHGHE |
| 101 | VHSPFDNHAS HSDSDEAGSP VDGFSLYRIH WDGYEHHPAD |
| | GYDGPQGGGY |
| 151 | PAPKGARDIY SYDIKGVAQN IRLNLTDNRS TGQRLADRFH |
| | NAGSMLTQGV |
| 201 | GDGFKRATRY SPELDRSGNA AEAFNGTADI VKNIIGAAGE |
| | IVGAGDAVQG |
| 251 | ISEGSNIAVM HGLGLLSTEN KMARINDLAD MAQLKDYAAA |
| | AIRDWAVQNP |
| 301 | NAAQGIEAVS NIFMAAIPIK GIGAVRGKYG LGGITAHPIK |
| | RSQMGAIALP |
| 351 | KGKSAVSDNF ADAAYAKYPS PYHSRNIRSN LEQRYGKENI |
| | TSSTVPPSNG |
| 401 | KNVKLADQRH PKTGVPFDGK GFPNFEKHVK YDTKLDIQEL |
| | SGGGIPKAKP |
| 451 | VFDAKPRWEV DRKLNKLTTR EQVEKNVQEI RNGNINSNFS |
| | QHAQLEREIN |
| 501 | KLKSADEINF ADGMGKFTDS MNDKAFSRLV KSVKENGFTN |
| | PVVEYVEING |
| 551 | KAYIVRGNNR VFAAEYLGRI HELKFKKVDF PVPNTSWKNP |
| | TDVLNESGNV |
| 601 | KRPRYRSK* |

[0372] Using the above-described procedures, the following oligonucleotide primers were employed in the polymerase chain reaction (PCR) assay in order to clone the ORFs as indicated:

TABLE 1

Restriction

| | | | |
|---|---|---|---|
| ORF | Primer | Sequence | sites |

| | | | |
|---|---|---|---|
| 279 | Forward | CGCGGATCCCATATG-TTGCCTGCAAT | BamHI-NdeI |
| | | CACGATT | |
| | | <SEQ ID 90> | |
| | Reverse | CCCGCTCGAG-TTTAGAAGCGGGCGGC | XhoI |
| | | AA | |
| | | <SEQ ID 91> | |
| 519 | Forward | CGCGGATCCCATATG-TTCAAATCCTT | BamHI-NdeI |
| | | TGTCGTCA | |
| | | <SEQ ID 92> | |
| | Reverse | CCCGCTCGAG-TTTGGCGGTTTTGCTG | XhoI |
| | | C | |
| | | <SEQ ID 93> | |
| 576 | Forward | CGCGGATCCCATATG-GCCGCCCCCGC | BamHI-NdeI |
| | | ATCT | |
| | | <SEQ ID 94> | |
| | Reverse | CCCGCTCGAG-ATTTACTTTTTTGATG | XhoI |
| | | TCGAC | |
| | | <SEQ ID 95> | |
| 919 | Forward | CGCGGATCCCATATG-TGCCAAAGCAA | BamHI-NdeI |
| | | GAGCATC | |
| | | <SEQ ID 96> | |
| | Reverse | CCCGCTCGAG-CGGGCGGTATTCGGG | XhoI |
| | | <SEQ ID 97> | |
| 121 | Forward | CGCGGATCCCATATG-GAAACACAGCT | BamHI-NdeI |
| | | TTACAT | |
| | | <SEQ ID 98> | |
| | Reverse | CCCGCTCGAG-ATAATAATATCCCGCG | XhoI |
| | | CCC | |
| | | <SEQ ID 99> | |
| 128 | Forward | CGCGGATCCCATATG-ACTGACAACGC | BamHI-NdeI |
| | | ACT | |
| | | <SEQ ID 100> | |
| | Reverse | CCCGCTCGAG-GACCGCGTTGTCGAAA | XhoI |
| | | <SEQ ID 101> | |
| 206 | Forward | CGCGGATCCCATATG-AAACACCGCCA | BamHI-NdeI |
| | | ACCGA | |
| | | <SEQ ID 102> | |
| | Reverse | CCCGCTCGAG-TTCTGTAAAAAAAGTA | XhoI |
| | | TGTGC | |
| | | <SEQ ID 103> | |
| 287 | Forward | CCGGAATTCTAGCTAGC-CTTTCAGCC | EcoRI-NheI |
| | | TGCGGG | |
| | | <SEQ ID 104> | |
| | Reverse | CCCGCTCGAG-ATCCTGCTCTTTTTTG | XhoI |
| | | CC | |
| | | <SEQ ID 105> | |
| 406 | Forward | CGCGGATCCCATATG-TGCGGGACACT | BamHI-NdeI |
| | | GACAG | |
| | | <SEQ ID 106> | |
| | Reverse | CCCGCTCGAG-AGGTTGTCCTTGTCTA | XhoI |
| | | TG | |
| | | <SEQ ID 107> | |

### EXAMPLE 2

### Expression of ORF 919

[0373] The primer described in Table 1 for ORF 919 was used to locate and clone ORF 919. The predicted gene 919 was cloned in pET vector and expressed in E. coli. The product of protein expression and purification was analyzed by SDS-PAGE. In panel A) is shown the analysis of 919-His fusion protein purification. Mice were immunized with the purified 919-His and sera were used for Western blot (panel B), FACS analysis (panel C), bactericidal assay (panel D), and ELISA assay (panel E). Symbols: M1, molecular weight marker; PP, purified protein, TP, N. meningitidis total protein extract; OMv, N. meningitidis outer membrane vesicle preparation. Arrows indicate the position of the main recombinant protein product (A) and the N. meningitidis immunoreactive band (B). These experiments confirm that 919 is a surface-exposed protein and that it is a useful immunogen. The hydrophilicity plots, antigenic index, and amphipatic regions of ORF 919 are provided in FIG. 10. The AMPHI program is used to predict putative T-cell epitopes (Gao et al 1989, J. Immunol 143:3007; Roberts et al. 1996, AIDS Res Human Retroviruses 12:593; Quakyi et al. 1992, Scand J Immunol Suppl 11:9). The nucleic acid sequence of ORF 919 and the amino acid sequence encoded thereby is provided in Example 1.

### EXAMPLE 3

### Expression of ORF 279

[0374] The primer described in Table 1 for ORF 279 was used to locate and clone ORF 279. The predicted gene 279 was cloned in pGex vector and expressed in E. coli. The product of protein expression and purification was analyzed by SDS-PAGE. In panel A) is shown the analysis of 279-GST purification. Mice were immunized with the purified 279-GST and sera were used for Western blot analysis (panel B), FACS analysis (panel C), bactericidal assay (panel D), and ELISA assay (panel E). Symbols: M1, molecular weight marker; TP, N. meningitidis total protein extract; OMV, N. meningitidis outer membrane vescicle preparation. Arrows indicate the position of the main recombinant protein product (A) and the N. meningitidis immunoreactive band (B). These experiments confirm that 279 is a surface-exposed protein and that it is a useful immunogen. The hydrophilicity plots, antigenic index, and amphipatic regions of ORF 279 are provided in FIG. 11. The AMPHI program is used to predict putative T-cell epitopes (Gao et al 1989, J. Immunol 143:3007; Roberts et al. 1996, AIDS Res Human Retroviruses 12:593; Quakyi et al. 1992, Scand J Immunol Suppl 11:9). The nucleic acid sequence of ORF 279 and the amino acid sequence encoded thereby is provided in Example 1.

### EXAMPLE 4

### Expression of ORF 576

[0375] The primer described in Table 1 for ORF 576 was used to locate and clone ORF 576. The predicted gene 576 was cloned in pGex vector and expressed in E. coli. The product of protein purification was analyzed by SDS-PAGE. In panel A) is shown the analysis of 576-GST fusion protein purification. Mice were immunized with the purified 576-GST and sera were used for Western blot (panel B), FACS analysis (panel C), bactericidal assay (panel D), and ELISA assay (panel E). Symbols: M1, molecular weight marker; TP, N. meningitidis total protein extract; OMV, N. meningitidis outer membrane vescicle preparation. Arrows indicate the position of the main recombinant protein product (A) and the N. meningitidis immunoreactive band (B). These experiments confirm that ORF 576 is a surface-exposed protein and that it is a useful immunogen. The hydrophilicity plots, antigenic index, and amphipatic regions of ORF 576 are provided in FIG. 12. The AMPHI program is used to predict putative T-cell epitopes (Gao et al 1989, J. Immunol 143:3007; Roberts et al. 1996, AIDS Res Human Retroviruses 12:593; Quakyi et al. 1992, Scand J Immunol Suppl 11:9). The nucleic acid sequence of ORF 576 and the amino acid sequence encoded thereby is provided in Example 1.

### EXAMPLE 5

### Expression of ORF 519

[0376] The primer described in Table 1 for ORF 519 was used to locate and clone ORF 519. The predicted gene 519 was cloned in pET vector and expressed in E. coli. The product of protein purification was analyzed by SDS-PAGE. In panel A) is shown the analysis of 519-His fusion protein purification. Mice were immunized with the purified 519-His and sera were used for Western blot (panel B), FACS analysis (panel C), bactericidal assay (panel D), and ELISA assay (panel E). Symbols: M1, molecular weight marker; TP, N. meningitidis total protein extract; OMV, N. meningitidis outer membrane vesicle preparation. Arrows indicate the position of the main recombinant protein product (A) and the N. meningitidis immunoreactive band (B). These experiments confirm that 519 is a surface-exposed protein and that it is a useful immunogen. The hydrophilicity plots, antigenic index, and amphipatic regions of ORF 519 are provided in FIG. 13. The AMPHI program is used to predict putative T-cell epitopes (Gao et al 1989, J. Immunol 143:3007; Roberts et al. 1996, AIDS Res Human Retroviruses 12:593; Quakyi et al. 1992, Scand J Immunol Suppl 11:9). The nucleic acid sequence of ORF 519 and the amino acid sequence encoded thereby is provided in Example 1.

### EXAMPLE 6

### Expression of ORF 121

[0377] The primer described in Table 1 for ORF 121 was used to locate and clone ORF 121. The predicted gene 121 was cloned in pET vector and expressed in E. coli. The product of protein purification was analyzed by SDS-PAGE. In panel A) is shown the analysis of 121-His fusion protein purification. Mice were immunized with the purified 121-His and sera were used for Western blot analysis (panel B), FACS analysis (panel C), bactericidal assay (panel D), and ELISA assay (panel E). Results show that 121 is a surface-exposed protein. Symbols: M1, molecular weight marker; TP, N. meningitidis total protein extract; OMV, N. meningitidis outer membrane vescicle preparation. Arrows indicate the position of the main recombinant protein product (A) and the N. meningitidis immunoreactive band (B). These experiments confirm that 121 is a surface-exposed protein and that it is a useful immunogen. The hydrophilicity plots, antigenic index, and amphipatic regions of ORF 121 are provided in FIG. 14. The AMPHI program is used to predict putative T-cell epitopes (Gao et al 1989, J. Immunol 143:3007; Roberts et al. 1996, AIDS Res Human Retroviruses 12:593; Quakyi et al. 1992, Scand J Immunol Suppl 11:9). The nucleic acid sequence of ORF 121 and the amino acid sequence encoded thereby is provided in Example 1.

### EXAMPLE 7

### Expression of ORF 128

[0378] The primer described in Table 1 for ORF 128 was used to locate and clone ORF 128. The predicted gene 128 was cloned in pET vector and expressed in E. coli. The product of protein purification was analyzed by SDS-PAGE. In panel A) is shown the analysis of 128-His purification. Mice were immunized with the purified 128-His and sera were used for Western blot analysis (panel B), FACS analysis (panel C), bactericidal assay (panel D) and ELISA assay (panel E). Results show that 128 is a surface-exposed protein. Symbols: M1, molecular weight marker; TP, N. meningitidis total protein extract; OMV, N. meningitidis outer membrane vesicle preparation. Arrows indicate the position of the main recombinant protein product (A) and the N. meningitidis immunoreactive band (B). These experiments confirm that 128 is a surface-exposed protein and that it is a useful immunogen. The hydrophilicity plots, antigenic index, and amphipatic regions of ORF 128 are provided in FIG. 15. The AMPHI program is used to predict putative T-cell epitopes (Gao et al 1989, J. Immunol 143:3007; Roberts et al. 1996, AIDS Res Human Retroviruses 12:593; Quakyi et al. 1992, Scand J Immunol Suppl 11:9). The nucleic acid sequence of ORF 128 and the amino acid sequence encoded thereby is provided in Example 1.

### EXAMPLE 8

### Expression of ORF 206

[0379] The primer described in Table 1 for ORF 206 was used to locate and clone ORF 206. The predicted gene 206 was cloned in pET vector and expressed in E. coli. The product of protein purification was analyzed by SDS-PAGE. In panel A) is shown the analysis of 206-His purification. Mice were immunized with the purified 206-His and sera were used for Western blot analysis (panel B). It is worth noting that the immunoreactive band in protein extracts from meningococcus is 38 kDa instead of 17 kDa (panel A). To gain information on the nature of this antibody staining we expressed ORF 206 in E. coli without the His-tag and including the predicted leader peptide. Western blot analysis on total protein extracts from E. coli expressing this native form of the 206 protein showed a reactive band at a position of 38 kDa, as observed in meningococcus. We conclude that the 38 kDa band in panel B) is specific and that anti-206 antibodies, likely recognize a multimeric protein complex. In panel C is shown the FACS analysis, in panel D the bactericidal assay, and in panel E) the ELISA assay. Results show that 206 is a surface-exposed protein. Symbols: M1, molecular weight marker; TP, N. meningitidis total protein extract; OMV, N. meningitidis outer membrane vesicle preparation. Arrows indicate the position of the main recombinant protein product (A) and the N. meningitidis immunoreactive band (B). These experiments confirm that 206 is a surface-exposed protein and that it is a useful immunogen. The hydrophilicity plots, antigenic index, and amphipatic regions of ORF 519 are provided in FIG. 16. The AMPHI program is used to predict putative T-cell epitopes (Gao et al 1989, J. Immunol 143:3007; Roberts et al. 1996, AIDS Res Human Retroviruses 12:593; Quakyi et al. 1992, Scand J Immunol Suppl 11:9). The nucleic acid sequence of ORF 206 and the amino acid sequence encoded thereby is provided in Example 1.

### EXAMPLE 9

### Expression of ORF 287

[0380] The primer described in Table 1 for ORF 287 was used to locate and clone ORF 287. The predicted gene 287 was cloned in pGex vector and expressed in E. coli. The product of protein purification was analyzed by SDS-PAGE. In panel A) is shown the analysis of 287-GST fusion protein purification. Mice were immunized with the purified 287-GST and sera were used for FACS analysis (panel B), bactericidal assay (panel C), and ELISA assay (panel D). Results show that 287 is a surface-exposed protein. Symbols: M1, molecular weight marker. Arrow indicates the position of the main recombinant protein product (A). These experiments confirm that 287 is a surface-exposed protein and that it is a useful immunogen. The hydrophilicity plots, antigenic index, and amphipatic regions of ORF 287 are provided in FIG. 17. The AMPHI program is used to predict putative T-cell epitopes (Gao et al 1989, J. Immunol 143:3007; Roberts et al. 1996, AIDS Res Human Retroviruses 12:593; Quakyi et al. 1992, Scand J Immunol Suppl 11:9). The nucleic acid sequence of ORF 287 and the amino acid sequence encoded thereby is provided in Example 1.

### EXAMPLE 10

### Expression of ORF 406

[0381] The primer described in Table 1 for ORF 406 was used to locate and clone ORF 406. The predicted gene 406 was cloned in pET vector and expressed in E. coli. The product of protein purification was analyzed by SDS-PAGE. In panel A) is shown the analysis of 406-His fusion protein purification. Mice were immunized with the purified 406-His and sera were used for Western blot analysis (panel B), FACS analysis (panel C), bactericidal assay (panel D), and ELISA assay (panel E). Results show that 406 is a surface-exposed protein. Symbols: M1, molecular weight marker; TP, N. meningitidis total protein extract; OMV, N. meningitidis outer membrane vescicle preparation. Arrows indicate the position of the main recombinant protein product (A) and the N. meningitidis immunoreactive band (B). These experiments confirm that 406 is a surface-exposed protein and that it is a useful immunogen. The hydrophilicity plots, antigenic index, and amphipatic regions of ORF 406 are provided in FIG. 18. The AMPHI program is used to predict putative T-cell epitopes (Gao et al 1989, J. Immunol 143:3007; Roberts et al. 1996, AIDS Res Human Retroviruses 12:593; Quakyi et al. 1992, Scand J Immunol Suppl 11:9). The nucleic acid sequence of ORF 406 and the amino acid sequence encoded thereby is provided in Example 1.

[0382] The foregoing examples are intended to illustrate but not to limit the invention.

1. A protein comprising the amino acid sequence encoded by nucleotides 564043 to 565882 of SEQ ID NO 1.

2. A protein comprising an amino acid sequence which sequence has 50% or greater identity to the amino acid sequence encoded by nucleotides 564043 to 565882 of SEQ ID NO 1.

3. A protein comprising a fragment of 7 or more amino acids of the amino acid sequence encoded by nucleotides 564043 to 565882 of SEQ ID NO 1.

4. The protein of claim 3, wherein the fragment comprises an epitope from the amino acid sequence encoded by nucleotides 564043 to 565882 of SEQ ID NO 1.

5. An antibody which binds to a protein according to any one of claims 1 to 4.

6. The antibody of claim 5, wherein the antibody is a monoclonal antibody.

7. A nucleic acid which encodes a protein according to any one of claims 1 to 4.

8. The nucleic acid of claim 7, comprising nucleotides 564043 to 565882 of SEQ ID NO 1.

9. A nucleic acid comprising a fragment of 10 or more nucleotides from within nucleotides 564043 to 565882 of SEQ ID NO 1.

10. A nucleic acid comprising a nucleotide sequence which sequence has 50% or greater identity to nucleotides 564043 to 565882 of SEQ ID NO 1.

11. A nucleic acid comprising a nucleotide sequence complementary to a nucleic acid sequence as defined in claim 7.

12. A nucleic acid comprising a nucleotide sequence complementary to a nucleic acid sequence as defined in claim 9.

13. A nucleic acid comprising a nucleotide sequence complementary to a nucleic acid sequence as defined in claim 10.

14. A nucleic acid which can hybridise to the nucleic acid of claim 7 under high stringency conditions.

15. A nucleic acid which can hybridise to the nucleic acid of claim 9 under high stringency conditions.

16. A nucleic acid which can hybridise to the nucleic acid of claim 10 under high stringency conditions.

17. A composition comprising a protein, a nucleic acid, or an antibody according to claim 1.

18. A composition comprising a protein, a nucleic acid, or an antibody according to claim 2.

19. A composition comprising a protein, a nucleic acid, or an antibody according to claim 3.

20. A protein comprising the amino acid sequence encoded by nucleotides 1812090 to 1812753 of SEQ ID NO 1.

21. A protein comprising an amino acid sequence which sequence has 50% or greater identity to the amino acid sequence encoded by nucleotides 1812090 to 1812753 of SEQ ID NO 1.

22. A protein comprising a fragment of 7 or more amino acids of the amino acid sequence encoded by nucleotides 1812090 to 1812753 of SEQ ID NO 1.

23. The protein of claim 22, wherein the fragment comprises an epitope from the amino acid sequence encoded by nucleotides 1812090 to 1812753 of SEQ ID NO 1.

24. An antibody which binds to a protein according to any one of claims 20 to 23.

25. The antibody of claim 24, wherein the antibody is a monoclonal antibody.

26. A nucleic acid which encodes a protein according to any one of claims 20 to 23.

27. The nucleic acid of claim 26, comprising nucleotides 1812090 to 1812753 of SEQ ID NO 1.

28. A nucleic acid comprising a fragment of 10 or more nucleotides from within nucleotides 1812090 to 1812753 of SEQ ID NO 1.

29. A nucleic acid comprising a nucleotide sequence which sequence has 50% or greater identity to nucleotides 1812090 to 1812753 of SEQ ID NO 1.

30. A nucleic acid comprising a nucleotide sequence complementary to a nucleic acid sequence as defined in any one of claims 20 to 23.

31. A nucleic acid which can hybridise to the nucleic acid of any one of claims 20 to 23 under high stringency conditions.

32. A composition comprising a protein, a nucleic acid, or an antibody according to any one of claims 20 to 23.

33. A composition according to claim 32 being a vaccine composition or a diagnostic composition.

The application's sequence listing, which the Patent Office published only in electronic form, follows.

SEQUENCE LISTING (115 sequences)

SEQ ID NO: 1 - DNA, 2242716 bp, Neisseria meningitidis
taaaccttatccacatccaaacgcataaccgtaacccattcaccgttatggaaatgtcgcccgacaaccacccagccgaatgattcataaaatatttgcacatcaggcgtataaagatacaagaactttatccccagcgaacgcgctgcgcctatgcagtgggcgaccagcctcctgccaatgccttttccgcgatattcaggtaaaacaaagacatcccccaaccaatattcataccgtggaaaactttccatatcatgccgcttgaccgcagccgaacccaacaggattccggaatcatccacagccgcaaatgccagcggcagttcgtcatccttcaaacacctgccgtaataggcatgaatcttatccacagaagaccacggttcaaatccgtgccactcctcaaacaacgcctgaaccaacctgccgatatgcccggctttcagccgtgtaatgaaaacagtattgtccacaaagagggaattcatcggtcaattccccgacgccttcgttccccctgcgccgtaaaccgcattccaagcatggtccaaacgcactccgatttgcctcaaatcttcagcctgccgggctttttgcgccattgctgcaggaatttccgcttccaaacgggcgatgtctgcctgagccgtctgcaaacgccggcgcgcatcttccaaatccgactgcatcccgatgatttttccgtccagattgttttgcttttgcaataaggcgcggtaaccggattggatgctgagcagattgtcttcagcatcccctgcccatacgcttgtagaaaaaacaaccatcagaaaataaaatatttttttcatttttaacttccatttaaatgctgtctgaagccgtattccgacatcagacggcatcgcccacgcctgtggataacttaagcgcggatgcgtttcaacacttcttctttgccgattaatgccaacacagcatcgacgctgggggttttcgccgtaccgcagacggcaaggcgcaggggcatgccgagtttgcccattttaatgccttcttcgtcgcagaagggtttgaagaggtcgtggatggcttcggcattccagtcttccagcccttcgaggcgttcggcaaagcgcagcatacgggcggcggcttcatcgtcccagtgtttctgcacgtctgcttcggcaggcgtttgtttgacgtagaagtagaagcactcgtcggcaagcgtgttcaagtcttgggggcggtctttgaccagttccaacacatcttccaaagcaggtttttcggtttcatgaatatcgcgcaacgcaaggcggggtttgacgagttcggcgagtttgccgttgggtgtgattttgatgtgttcgccgttgatccagtagagttttttcaagtccatacggcttggagacggggaaacgtctttcaaatcaaaccattcgatgaattgttccattgtgaagaattcatcgtcgccgtgcgcccagcccaagcgtgccagatagttgagcatcgcttcgggcaggatgcccattgcgccgaaatcggtaatggcaacggtatcgccgctgcgtttggagatttttttgccttgttcgttaagaatcatcggcaggtggccgtattcgggcaggttcgcgtcgatggcttttaagatgttgatttgtttcggcgtgttgttcacatggtcgtcgccgcggataacgtgggtaacgcccatgtcgtagtcgtctacgacaacgcagaagttgtaggtcggcgtaccgtcggcgcgggcgataatcaggtcatcgagtgcttcgttggggatggagatttcgcctttgaccaagtctgtccatttggtcacaccgtccaaaggcgttttgaaacggacaacgggttgtacgtcggacgggatttcgggcagggttttacctacttccggacgccagcggcggtcgtaagtcgccgagccttctttttcggctttctcacgcatggcttccagctcttctttgctgcaatagcagtagtaggcatggcctttttctaaaagttcggcaatgacctctttgtagcggtcgaaacggcgagtttggtaaacgacgttgtcggcgttgtcgtaattgagaccgacccatttcatgccgtcgaggatgatgttgacggattcggcggtagaacgcgccaagtcggtgtcttcaatacgtaataggaactcgcctttatgatggcgggcaaacgcccatgaaaacaaggcggtgcgcacgccgccgatgtgcaggtagccggtggggctgggggcgaaacgggttttgacggtcatgatggctccgaaatctttgaaagcgtttattttactggttttaccgtgcttgggcatcaaaaatgccgtctgaaccctgcctgcggataaagtttcagacggcattttccttgttttcaatgcttcggcacgcggaacagtgtatcacgcgccgccgaccgaattccttcgggattgcgtccaaaaaaaagttcaatgaaacagctaattgaaaaaatcccgcccccatttttccaaacggtagagggataacgcatatccctcttgcagcataaagatttttttcttatttcccgcatcaaaccgcgtggtcggcgtggcagacatataaacgcggacacccaaatcctccgccatttccgccgcccgcgccaaatggtagggatcgctgacaatcaccacgctggcaataccgttggcacgcaaaaccggacggatgttgttcaggttttcataagtgttgcgcgaagtgttttcaaacaggatgttgcgcgccggaaccccctgtttgagtgcgtaccgccgcccgacctcggcttcggtcatatagccttttttggtccggcctcccgtaaacacgattttgcctaccctgcggctctgataaagtgcgatggcatggttgatgcgttcgcggaaaacaggagaagggcgtttgtcccacgcggcggcgcccaacaccagcgcggcatccgcccggacatacggcggcaaaacctgcccacccgtccgataaaccgcccaaacggatgaggcaaacaccagcaaaagcggaaaaacactcaaacagaaaccgcccaacaggtaatagcgcaagccgttgcggctgcaaaacagccgtttgttcacaataccgcttcgatattttccagcggtctgccgacagccgccttaccgtttgccaaaacaatcggacgctccaacagggcgggatgatcggcgatggcacgcagcagcgcgtcattgtccaaattggggttgtccaaacccaattccttatacaaatcatctttcacgcgcatcatcccgcgcgccgatgccaagcccaatttgttgaaaatatccttcaattcggacaagtcgggcggcgtatccaaatatttgaccacttcggcagcaatgccgcgttcttccaatagggacaaggcggcacgcgatttgctgcaacgcggattgtggaaaattttgatttcaggcatgacatttccttgcttctcgacaatccccttattatcggcttacacagggttttactcaatatcccgcctacaaccgtaccaaacggtttacaatacccgaatcgacatacaaaggacaaaacgatgaaatacttgaatcttgccgcaatcacccttgccgccacatttgccgcacataccgcctcggcagacgaactggccggatggaaagacaacaccccgcaaagcctgcaatcgctcaaagcccccgtacgcatcgtcaacctttgggcgacttggtgcggcccgtgccgaaaagagatgcctgccatgtccaaatggtacaaagcgcagaaaaaaggcagcgtcgatatggtcggcatcgcgctcgacacatccgacaatatcggcaacttcctcaaacaaactcctgtttcctacccgatttggcgttacaccggggcgaacagccgaaactttatgaaaacctacggaaacactgtcggcgtactgccctttaccgtcgtcgaagcaccgaaatgcggatacaggcagaccattaccggggaggtaaacgaaaaaagcctgaccgacgccgtcaaactcgcccattcaaaatgccgttaaacgccggatgccgtctgaagccgcttcagatggcatttttcttttccacccgcctgccggtgcaaacttatccactatctaaaaacaggcggaatctttataatcggcactgtcttacctattgttcagacggcatatccctgcggacgcaaccgcccgaaacgatatgccgcccttccttacaggacctcctatgatccgtttcgaacaagtttccaaaacctatcccggcggttttgaagccctgaaaaacgtcagcttccaaatcaacaaaggcgaaatgatatttatcgcgggacactccggttcgggcaaatccaccatcctcaaactgatttcgggcattaccaagccgagcaggggcaaaatcctgtttaacgggcaggacctcggcacattgtccgacaaccaaatcggctttatgcgccaacacatcggcatcgtgttccaagaccacaaaatcctctacgaccgcaacgtcctgcaaaacgtcatcctgccgcttcggattatcggctatccgccgcgcaaagccgaagagcgtgcccgcatcgccatcgaaaaagtcggcctgaaaggacgagaattggacgatcccgtaaccctctccggcggtgaacaacaacgcctgtgcatcgcccgcgccgtcgttcaccagcccggcctgctgattgccgacgaaccctccgccaacctcgaccgcgcctacgcgctcgatattatggaattgttcaaaaccttccacgaagcgggaactaccgtcatcgttgccgcacatgacgaaaccctgatggcggactacggacaccgcatcctgcgcctctcgaaaggacgactcgcatgagcatcatccactacctctcgctgcacgtcgaatccgcgcgcaccgcgctcaagcagctcctgcgccaacccttcggcacactgcttaccctcatgatgctcgccgtcgcgatgaccctgccgctgtttatgcatctgggcatccaaagcgggcaaagcgtgttgggcaaactcaacgagtcgccgcaaatcacaatctatatggaaacctccgccgcacaaagcgacagcgataccgtccgcagcctgctggcgcgcgacaaacggctcgacaacatccgcttcatcggcaaagaagacggtctggaagaattacagtccaatcttgaccaaaatctgatttccatgcttgacggcaaccccctgccggatgtctttatcgttacccccgacccggcaaccacgcccgcccaaatgcaggcaatctaccgagacattaccaaactgcctatggtcgaatccgcgtctatggataccgaatgggtgcaaacgctgtaccaaatcaacgagttcatccgcaaaattttgtggtttctttccctgacgctggggatggcgttcgtccttgtcgcacacaacaccatccgcctgcaaatcctcagccgcaaagaagaaatcgaaatcaccaaactcttgggcgcgcccgcgtcgtttatccgccgcccattcctttatcaagccatgtggcagagcatcctttccgccgccgtcagcttggggctttgcggttggctgctctctgccgtgcgcccattggtcgatgccattttcaaaccctacggacttaatatcggctggcggttcttctacgctggcgaactcgggctggtgttcggcttcgtcatcgcgttgggcgtattcggcgcgtggcttgccaccacccagcacctgctcggcttcaaagccaaaaaataaaacaccgtcaaaaatgccgtccgaacccgttttcagacggcatttcaatttgccagtataatggcgcatttttccaacaaggaacctaccatgctgacctcggaacaagtaaaagccatgattgaaggcgtggcaaaatgcgaacatatcgaagtagaaggcgacggacaccattttttcgccgtcatcgtttcatcagaatttgaaggcaaggcacgcctcgcgcgccaccgcctgattaaagacggactcaaagcccaactggaaagtaacgaactgcacgcactttccatttcggttgccgccactccggcggaatgggcagccaaagcacaataatcgccacacaaaaatgccgtctgaaaccatttcgtttcagacggcattttttttatatcaaaccgcttacgcgccgcgtttttccaaagcggctacggcaggcagctctttgccttccaagaactcaaggaacgcgccgccgccggtggagatgtagccgatttgttcggtaacgccgaatttggcaatcgccgccagcgtgtcgccgccgcccgcaatcgagaacgctttgctttgggcaatggcttcggcaagggctttcgtaccgcctgcgaattggtcaaactcgaacacgccgaccggcccgttccaaacgaccgtaccggcggctttaagcaaatcggcaagcgcggcagcggatttcggaccgatgtccaaaatcatctcgtcttcggcaacgtcggcaatgtctttcaccacagcttccgcatcggcggcaatgtctttcaccacagcttccgcatcggcggcaaaggctttggcaacgacgacatcggtcggcagcggcacagaaccgccttttgccgccattttcgccataatttttttggattcttccaccaaatcgtgttccgccaaagatttgccgatggctttgccttccgccaacaggaaggtgtttgcgataccgccgccgacgatgagttggtcgactttgtccgccagcgattcgaggatggtcagcttggtggacactttgctgccggcaacgatggcaaccatcgggcgcgcgggctgtttcaaggctttgcccaaagcgtcgagttcgcccgccatcaatacgccggcgcaggcaacgggcgcggcttgggcgacggcttcggtcgaggcttgggcgcggtgggcggttccgaacgcgtcattgacgaacacgtcgcacaaagaagcgtaggctttacccagttccaaatcgtttttcttctcgcctttgttgatgcgcacgttttgcagcatgacgacatcgcccgcgttcagggcgggtttgttttcacgccagtcgttcaatactttcacgtctttgcccaacaggctgcccaagtgcgcggcaacgggggcgacatcgtcttcggggtggaactcgccttcggtcgggcggccgagatgggtcatcacgataacggacgcaccgttgtccacgcagtatttaatggacgcgagcgaggcgcggatacgggtgtcgtcgctgattttgccgtctttgaacggtacgttcatatcggcgcggatgaggacggttttgccctgcacgttttgttcggtcagttttaaaaatgccataatcagtccttttcaatcagtgtttgcgatacggaaacaattgatgccgtctgaaggcttcagacggcatcgcaacccgatcagccggatacgcgctcgattttcgcgccgacgctgccgagttttttttcaatattttcataaccgcgatccaagtggtaaatctgttcgaccacggtttcgcctcgcgccgccaaaccggcgataacgaggctggcggacgcacgcaaatccgtcgccttgacgactgcgccggaaagctgttccacaccctgcacaaatgccgtattgccctcggttgtgatgttcgcccccatccggttcaactcggggacgtgcataaagcggttttcaaaaatcgtttccaccacgcggcagcttccctccgccacggcattcaatgccataaactgcgcctgcatatccgtggggaagccggggtggacgaccgtgcggatgtccaccgccttcggacgctgccgcatatcgatggcgatccaatcgtcgcccgcctcaatcaccgcacctgcctcaaccagtttgtccaacaccacttccatcgttttcggcgcggcattccgcaaaaccaccctgccaccggttatcgccaccgcgcacaggaacgtccccgcctcgatccggtcggggacgacgctgtgttcgcagccttgcagctcgtccaccccttccacaatcattgtggacgtaccgatgccgctgattttcgcgcccattttgaccaggcattccgccaaatcgaccacttcaggctcaatggcgcagttttccaaaaccgtcgtaccttccgccagcgtcgccgccatcagcaggttttccgtgccgccgacggtaacgacatccatcgccacgcgcgtacctttgagtttgcctttggctttgacgtaaccgtgttcgataacaatctcagcacccatcgcttccaagcctttcaaatgctgatcgacggggcgcgaaccgatggcgcagccgcccggcaggctgacttgcgcctcgccgaaacgcgccagcgtcgggcccagcaccaaaatcgaagcgcgcatcgttcggaccaactcgtaaggggcgcaggtattgtttaccgtaccgccgttgatttcaaattcgctgatattgtcggtcaggacgcgcgcgcccatcccctgaagcagcttttgcgtggttttcacatctgccagcatagggacgtttttcaggcgcaacgtacccgatgtcagcaaacccgcgcacatcagcggcaatgccgcgtttttcgcgcccgagaccgttatttccccgttgagcgggccgtttgcggagattttcagtttgtccacgtttgttctttcctggtgggtacttgtatagtgaattaacaaaaatcgggacaaggcggcgaagccgcagacagtacagatagtacagaaccgattcacttggtgcttcagcaccttagagaatcgttctctttgagctaaggcgaggcaataccgtactggtttttgttaatccactataatatttcaattctcgggacaacgcataaagcatcacccgatgaaggttgcagaggcggaattataagggattttcgggaaaaatacggaagccgcaccaaagaatttgacgaaatgccgcgctttccgaacaaggattgtcggaagacaaaaaagccgagttttgaaaactcagcttttttgctttatctggtgggtcgtgagcgattcgaacgctcgaccaacggattaaaagtccgctgctctaccggctgagctaacgacccgataagtttggaattttacagaccggccgaaaccctgtcaagccccttgcgggcggacgggcgttatatccgcttatcggcctgtttttttcgtataaaccaaagaagtcaacaccgatgcacccaatgcgccgaacacgaccgacagcgaaacggaaatcgggatatgcacccaatgcattaccagcattttcacaccgataaaacccaacacgaatgccaatccatatttcaggaagataaagcgttccgccacatccgccagcaggaaatacatcgcccgcaagcccagaattgcgaaaatattggaagtcagcacgataaacggatcggtggtaacggcaaagacggcggggatgctgtccacggcaaacacgacatcgctcaattcaatcatgaccagcaccaaaaacagcggcgtggcgatttttttgccgttttcgacggtaaaaaatttctcgccgtgaaattccgtgccgaccggaacgactttcttgacggtattcagcagcctgctgtttgccaaatcctctttctcatcgccttcgggcttcatcatgtgtataccagtatagagcaggaacgcgccaaacagatacagaatccactcaaactgctgaaccagtgccgcgccgacgaaaatcatgacggtgcgcaataccaatgcgcccaatacgccgtacagcagcacgcggtgctgaaactgtggtgcgactttgaagtagccgaatatcatcaggaacacgaaaatattgtcgactgccaacgatttttccaaaatgtagccggtaaagaattccaatactttttcttttgcgactgccgcgccgtagccgggattgccggcgagttcaaaatacagccagcccgcgaacaggcaggatacggcaacccacaagccgctccatgccaaggcttctttgacgccgactttatggctgccgtttttcttcagcgaaaacatatccaaggcaatcatgaccagcactgccgcaaaaaaaacgccgtaaaacaacggcgacccgatgccgggatattctgtcatggttcaatctcctgatttgaaatgtaattgtgttaccagctgatataaaacatcgcttttgccaaaaagacaatcagcagcatatgggtaaagacgacggcgtgtatgtatttcgaccaaccgaccgtcagtgtggaacgcgccattttgacgacggcgatggcgaagtgcgccaatacgctgaacgccaacaggattttcagcgtcagcatcgtaccgaaggaagtggcaaacggttcgcccaatatagaaagatagcggtttgccgccatcacgatgccgctggcgaacagcagtccgaccacaaacggcatcaccctgacggcgcggtaagacattgccttttccacttcgcgccgcgcctcgcgcgacacccgtcccgtatgcaggacggacaaaaccagcacttcaaaaaacacgccgccgacaaaggcaatagcgcaatacagatgaacgatgtgcgcgacggcataaatactcatacgatgctccaaacggaaaactcggatacggattgtatcactatcgcccccgatatccgcataccgcttcccgcaccgcctcggcgattctcgcgcccgctccgcgatgttgtgcgataaagccgtccacgcgcgcctgcatctgcatcccccccccctcggacgataaggttttttcaacggcttcccgccacgcatccgccgattcgacttgaaccgccgcacccgatgccaaggcgtgtcggcaggcttcggaaaaattgtaggttgaaaagccgaatatcgtcggaacgccgcaggaaagcggttcgatgatgttctgacaacccgaatcgaccagactgccgccgacaaaagcgacatcggcgcacaggtaatacgcatacagctcgcccatactgtcgcctatccacacctgcgtatcaggttcgaccggcaaaccgtcgctgcgccgctgaaccttaaacccgaagcgttttgccgtttcaaataccgtctgaaaatgctcgggatggcgcggcacgacgaccagcagcgcatcgccgcgatattgttgccacgccgccagcagtttttccgcctcgtcttcaccccgataaacgcgcgtgctgccgcacacggcaaccggccggcctccgatgcgtttttcaaactgccccgccagcgttttcatctgttccgacggtatgatgtcgtatttggtattgccgcacacctgcacggatgccgcgcccaatttcgccaaccgcgccgcatccgcctctgtctgcgccagacaccccgtcagcgaagcggcggcaggacggatcaggcggcggactttcagataaccgttcaacgatttttccgacagccgcgcattcgccaaaaacagcggcacacccgcgcgccggcattccctcatcaggttgggccagatttcggtttccatcaaaatgccgaacatcgggcggtgttcgcgcaaaaactgccgtacccacgtttttttgtcatacggaagatagcggcattgcgcatcgggaaacagaacttgcgcggtttcccgccccgtcggggtcatctgcgtcatcagcagcggcgcatcgggaaaacgccgccgcaactcgcgtatcaaggactgggcggcacgcgtttctccgaccgaaacggcgtgtatccaaaccgcgccggtaacgggattcggatacggcttgccgaaacgctcgtcccgatgcgcccgatatgccggggcacttccggagcgtttgtccaaataacgccgtatccatatcggcgcaagcagccacaatacatcataaagccattggaacatctttctatttcctgcaaaacaaatgccgtctgaacggttcagacggcatttcggcaacggaatcaaatatcgtaggttgtcgaagcggtatctccgcccttgcccgtccagttggtatggaaaaactcaccgcgcggtttgtcggtgcgctcgtaagtgtgcgcgccgaagtagtcgcgctgtgcctgcaagaggttggcaggcagacgttcggtcgtgtagccgtccaagaacgtaatcgccgaagccatgcagggcatagggatgccgcattcgaccgccttggcaaccaccttgcgccacgccggcaggcagttttccaaaatatttttgaaatacggatccgcacccaagaacaccaaatcgggattgttttcatacgcgtcgcggatattgcttaagaatgcgctgcgaatgatgcacccctcgcgccacagcagcgcagtgttgccgtagtccaaatcccagccgtagctttcgcccgcttcgcggatcagcataaagccttgtgcgtaggaaatgattttagatgcaagcagggcctgtctcaacgcctcgacccattcttgtttgccgccttcgacgggcgtaacggttcgggcgaacagtttgccggtctgcacgcgctgttctttgaacgacgaaacgcagcgggcgaatacggcttcggaaatcagcgtcagcggaatacccaaatccaaagcattgatgcccgtccatttgcctgtacctttttgccctgccgtatcgaggattttctcgaccagcggttcgccgccttcgtccttatagcccaaaattgccgctgtgatttcaatcagataagaatccagctcggttttgttccactcggcaaacacgcggtacatttcgtcgtaagacagccccaagccgtctttcatgaactggtacgcttcgcaaatcaactgcatatcgccatattcgatgccgttatgcaccattttgacaaaatgccccgcaccgtctttgccgacccagtcgcaacacggttcgccctgcgacgttttggcggcaatcgcctgaaaaatcggcttgaccgcatcccaagcgcgcttatccccgcccggcataatggacggcccgcgccgcgccccttcttccccgccggacacgcccgcgccgacaaacaaaatccctttttcagcaaggtaatgtgtccgccgtgtcgtgtcggggtaattggcattgccgccgtcgataaggatgtcgccttcttccaacagcggaagcagttgttcgataaattcgtcaaccaccgaaccggcacgaaccatcatcataatttttcgcggtttttccagcttatcgaccaaatcttgcaaagaatacgcgccgataatattagttccttttgccgcgccgtttaaaaattcgtccaccttggcagtcgtgcggttgtaggcaaccaccttaaatccgcaatcgttcatattcaaaatcaggttttgccccataaccgccaaaccgattacaccaatatcgccgttcattgcaggaagctccgttatagatttaatttatcgaccgcaactctacccgatttacacttgtttaacaatccttaactttttaattttttgaaaagatgcctttacgctttgctgtaccgttttgctgaagggttataaataaaatataaaatttaaataataaaacgatgattatattgataggagaaattttctgtgggtaacttttttttattttaaaaatcatcaggatttcttttttttagggtgtcggtaaggcggattcccttttgtgcatacctgtggattgtttttcatgaagaatagtttttgtggacagtttgcttgttgtgcaaatggcatcctacttttctttaccgaatggctgccgatgtctttaagaaccggaatactgtggaggtttgagaggaaagtgtgtttggaacttgtggaaatggtcaggtgtcggcacgaatgtcttatttctgcatatcggcagagtgcgcatccgaatttgtgtataagtggtggaaaaaatgagatttgcgggtaaatctcacaatatttcagtcagataactttggattgcttgtgtataagtaaactttcggatggggatacgtaacggaaacctgtaccgcgtcattcccacgaacctacattccgtcattcccacgaaagtgggaatgatgaaattttgagttttaggaatttatcgggagcaacagaaaccgctccgccgtcattcccgcgcaggcgggaatctagaacgtaaaatctaaagaaaccgtgttgtaacggcagaccgatgccgtcattcccgcgcaggcgggaatctagaccattggacagcggcaatattcaaagattatctgaaagtccgagattctggattcccactttcgtgggaatgacgggatttgagattgcggcatttatcggaaaaaacagaaaccgctccgccgtcattcccgcgcaggcgggaatccagaccttagaacaacagcaatattcaaaggttatctgaaagtccgagattctggattcccactttcgtgggaatgacgggattttaggtttctgattttggttttctgtttttgtgggaatgatgaaattttgagttttaggaatttaccggaaaaaacagaaaccgctccgccgtcattcccgcgcaggcgggaatccagaccttagaataacagcaatattcaaagattatctgaaagtccgggattctagattcccactttcgtgggaatgacggcatcagtctgccgtttacagcacggtttctttagattttacgttctagattcccgcctgcgcgggaatgacgaatccatccatacgaaaacctgcaccacgtcattcccacgaacctacatcccgtcattcccacaaaaacagaaacctcaaatcccgtcattcccgcgcaggcgggaatctagacttgtcggtgcggacgcttatcggataaaacggtttcttgagattccgcgtcctggattcccactttcgcgggaatgacgaattttaggtttctgttttggttttttgtccttgtaggaatgatgaaaatttaagttttaggaatttaccggaaaaaatagaaagcgttatccacaagttctgatgttcagctcgtgaaatgcgtcgggcaaatcatcgctgtcggcaaattccacccggtcgtaagccgtttcgtctgccaaaaccgcgcgcaagagtgcgttgttgatggcgtgtcccgatttgtagccttcaaatgcgccgacaatcggatgtccgacgatatacaaatcaccgatggcatcaaggattttgtggcgcacaaactcatcgggatagcgcaagccttcaggattcaggacatccgtgtcgtcaatcacgatggcgttgttcaaattgccgcccaaacccagattgtgggcgcgcatcatttccacttcgtgcataaagccgaaagtgcgcgcgcgcgcgatttcgtcgatgtaggatttgccggcgaaatcgatttcaaaagtgggcgagctgcggttgaaaaccggatggtcgaattcgatggtcagcgttaccttaaagccgtcatacggcgtaaagcgcacccatttgcccgcttctttgatttcgacaggcttgaggattttcaaaaaacgcttttgcgccttttgatcgaccacgcccgcatcttgcaaaaggtaaataaacggcaggctggagccgtccataatcgggatttcgggcgcgttcagctcaatcagcgcattgtcgatgccgtaggcggacagcgcggacataatgtgttcgatcgtgccgacgcgcacgcctttgtcggtaacgatggtggaggaaaggcgggtatcgttgatcaaataaggggtcagcttgatttgttcgcccatctcgccgtccaaatcggtacggcggaaggaaatcccgctgttttcaggcgcggggtgcagggtcagcgcgacgcgttcgcccgaatgcagcccgacgccggtaacgctgatggatttcgccaaagttctttgcagcataaaccgcttccttatcaagggggtaagttttggaataatacgataaaaccggaaaaacaggctatgtttttccatagtatttgccaatgtatccgttttcaatacgtaagccgcataaaaatgtatagtggattaacaaaaatcaagacaaggcgacgaacccacccccctcctgaaaaacgcaaaaaatgccgtccgaaaacctttcggacggcattttcgcgtaaaccgtcattcccacaaggacaaaaaaccaaaacagaaaaccaaaaacagcaacctaaaattcgtcattcccgcgcaggcgggaatttggaatttcaatgcctcaagaatttatcggaaaaaaccaaaacccttccgccgtcattcccacgaaagtgggaatctagaaatgaaaagcagcaggcatttatcggaaatgaccgaaactgaacggactggattcccgcttttgcgggaatgacggcgacagggttgctgttatagtggatgaacaaaaaccagtacggcgttgcctcggcttagctcaaagagaacgattctctaaggtgctgaagcaccaagtgaatcggttccgtactatttgtactgtctgcggcttcgtcgccttgtcctgatttttgttaatccactatatctagccgaattactttattttttgatacgtaaccggccggttgccgtcattcccgcgcaggcgggaatctagacattcaatgctaaggcaatttatcgggaatgactgaaactcaaaaagctggattcccactttcgtgggaatgacgcggtgcaggtttccgtacggatagcttcgtcattcccgagtaggcgggaatctagtccgcttgttcggtaaatgagagggcggattgcgcgcctgtcagataaaccacgtgtttaaacgggcggcaatgaggtacgcgcagagccttgaagcgcaatcgatatattattttcagccaaaacggacgcccccgcttgccttgcaaacctttaaaaaggaagccacccggattaatccgagtggccgtggaaaatcacttaccgcttgatttatttaaaatttatggtataatttaccttagctggcatcacttgcgtcgcggcaggttgacggcaggtgcttggtgtcaatcttcttaccgttggcggcggcggcggcggtaacgtcgtcgttggcggctttggctttgtcgcgcgtaaccggctgtccgcagaaccattttaccgaaccgttttgacgcttggcccacagggagagttttttgcctttgatttcgttgtttacgttgcttgaagccatttgggcggtaacgacgccgtttttgacttcaacgcttttaacatatttgcctttgatttcagaggaggttgccacgccggcagaagtgttgttgccgggccattcgccgtgattcaggtaatactcggtaacggctgatttttgaccttcggccaaaagaatggcttcggaaacttgtgcgcgggctgtgtagtcttgataagcaggaagggcgactgccgccaaaatgccgacgatggcaatcacaatcatcagctcgataagggtaaaacctttttgaagggtgttcataaaattactcctaattggaaaggaaatgcctcaagcttacgccatcggcattatgcaatgtatttgaccatcggtattttgttgcgatacctgtgtattataaagcaagattggtaccaagtttgtattttgaggtgaaaatttatgcgtttatctctatgtaattgtttttattttacattttctttcgtttggcgtggtttgagtaattagggggttgccgttttttgtcagcagtgttgaaaattgtcagttttagtgccgattttcggcacttttttattggcgtggggtatctctattggcatggggcatcgggtgtgttgattgggtcggaatttgagatttttgaatttgcgcggtagcatagggtgggttgggtgggaaattttaaatttaatttttaaaaatttccgttttcttggaaagtgattgaaatcggcgcgtggtgttcctgtgcaaccggcagttgaatcatcgcggcaggtttccgtgcggatggcttcgtcattcccgcgcaggcgggaatccagccttgttggtacggaaacttatcgggaaaacggtttcttgagattttacgttctggattcccactttcgcgggaatgacgcggtgcaggtttccgtatggatagcttcgtcattcccgcgcaggcgggaatccaggtctgtcggcacggaaacttatcgggtaaaaaggtttcttgagatttttcgtcctggattcccactttcgtgggaatgacgggatgtaggttcgtgggaatgacggtttaggtatttttatagaaagccgtaggtggtgtttctatgcaaacgacagatgaatcatcgcggcaggttgacggcaggtgcttggtgtcgattttgtcggtgccggtggcggcggcggtaacggcgtcgtctttggcgttgtcggcgcgcgtaaccggcagtccgcagaaccattttaccgaaccggcttgacgcttggcccacagggagagttttttgcctttgatttcgttgtttacgttgcttgaagccatttgggcggtaacgacgccgtttttgacttcaacgcttttaacatatttgcctttgatgtcggcggaggttgccacgccggcagaactgttgttgccgggccattcgccgtgattcaggtaatactctgtgacggctgatttttgaccttcagccaaaagaatggcttcgtcattcccgcgcaggcgggaatctaggtctgtcggcacggaaacttatcgggaaaacagtttcttgagattttgcgttctggattcccgctttcgcgggaatgacgggattaaagtttcaaaatttattctaaataactgaaattcaacgaactagattcccactttcgtgggaatgacgaattttaggttgctgtttttgtgggaatgatgaaattttaagttttaggaatttatcgaaaaaacagaaaccgctccgccgtcattcccgcgcaggcgggaatccagcctcgtcggtacggaaacttatcgggtaaaaaggtttctctagtttggtgtcgattttcttgtcgatgctgttgacggcaggtgcttggtgtcgatctgcttgccgttggcggcggtgtcggctttgacggcgtcggcgctggcgttgtcgcgcttaaccggctgtccgtagaaccattttaccgaaccgtcttgacgcttggcccacagggagagttttttgccttggatttctttgtttacgccgcttgaaagcattgtggcggtaacgacgccgtttttgacttcaactttctcaacatatttgcctttgatgttggcggaggttgccacgccggcagaactgttgttgccgggccattcgccgtgattcaggtaatactcggtgacggctgatttttgaccttcagccaaaagaatggcttcgtcattcccgcgcaggcgggaatctagaccttagaacaacagcaatattcaaagattatctgaaagtccgggattctagattcccactttcgtgggaatgacgaattttaggttgctgtttttggttttctgtttttgagggaatgatgaaattttaagttttaggaatttatcagaaaaaacagaaaccgctccgccgtcattcccgcgcaggcgggaatccaggtctgtcggtacggaaacttatcgggtaaaacggtttctctagtttggtgtcgattttcttgtcggtgctgttgacggcaggtgcttggtgttgatgttggcggtgcccttgccggtggcggcggtgacggcgtcgtctttggctttgtcgcgcgtaaccggctgtccgcagaaccattttaccgaaccgttttgacgcttggcccacagggagagttttttgcctttgatttcgttgtttacgttgcttgaagccatttgggcggtaacgacgccgtttttgacttcaacgcttttaacatatttgcctttgatttcagaggaggttgccacgccggcagaactgttgtcgccgggccattcgccgtgattcaggtaatactcggtaacggctgatttttgaccttcgaccaaaaggatagcttcgtcattcccgcgcaggcgggaatccagccttgtcggtacggaaacttatcgggtaaaacggtttctttagattttgcgttctggattcccactttcgtgggaatgacgggattaaagtttcaaaatttattctaaataactgaaactcaacgaactagattcccgcttttgcgggaatgacgaattttaggtttctgttttgggttttctgtttttgagggaatgatgaaattttaggtttctgtttttggttttctgtccttgtgggaatgatgaaattttaagttttaggaatttatcggaaaaaacagaaaccgctccgccgtcattcccgcgcaggcgggaatccagcctcgtcggtgcggaaacttatcgggaaaacggtttctttagattttacgttctggattcctactttcgtgggaaagacgaattttaggtttctgtttttggttttctgtccttgtgggaatgatgaaaatttaagttttaggaatttatcggaaaaaacagaaaccgctctgccgtcattcccgcaaaagcgggaatccagcctcgtcggtgcggaaacttatcgggtaaaaaggtttctttagtttggtgtcgattttgtcggtgccggtggcggcggcaacgtcgtctttggcgttgtcggcgcgcgtaaccggctgtccgcagaaccattttaccgaaccggcttgacgcttggcccacagggagagttttttgcctttgatttcgttgtttacgccggttgaaagcattgtggcggtaacgacgccgtttttgacttcaacttccttaacatatttgcctttgattgttgaagaagatgccacgccggcggcatcattaaatcccgtcattcccactttcgtgggaatgacgggattaaagtttcaaaatttattctaaataactgaaactcaacgaactagattcccgcttttgcgggaatgacgaattttaggttgctgtttttggttttctgtccttgcgggaatgatgaaattttaagttttaggaatttatcgaaaaaacagaaaccgctccgccgtcattcccgcgcaggcgggaatccagcctcgtcggtgcggaaacttatcgggaaaacggtttcttgagattttgcgttctggattcccgctttcgtgggaatgacggtttaggtatttttatagaaagccgtaggtggtgtttctatgcaaacgacagatgaagcgtcgcggcaggttgacggcaggtgcttggtgttgatgttgtcggcggtcttggcggcggcggcgacggtgtcggctttggcgtcggtgcgcgtaaccggctgtccgcagaaccattttaccgaaccgtcttgacgcttggcccacagggagagttttttgccttggatttctttgtttacgccgcttgaaagcattgtggcggtaatgacgccgtttgcgactgtaacttccttaacatatttgcctttgattgttgaagaagatgccacgccggcagaagtgttgttgccgggccattcgccgtgattcaggtaatactctgtgacggctgatttttgaccttcggccaaaaggatagcttcgtcattcccgcgcaggcgggaatccaggtctgtcggtacggaaacttatcgggtaaaacggtttctttagattttgcgttctggattcccactttcgcgggaatgacgggattaaagtttcaaaatttattctaaataactgaaaccaacgaactagattcccacttttgcgggaatgacgaagtttttctgccatttgccgtgattcgggcaatactcggtaacggctgattttttgaaagtgtttgaaatcggcgcgtggtgtttctatgcaaccggtagatgaatcatcgcggcaggttgacggcaggtgcttggtgttgattttgtcgtcggtcttgccgttggcggcggcgacgtcggtggcggtggcggtggcggtgtcgttgcgcgtaaccggctgtccgcagaaccatttgaccgaaccgttttgacgcttggcccacagggagagttttttgcctttgatttctttgtttacgccgcttgaaagcattgtggcggtaacgacgccgtttttgacttcaactttctcaacatatttgcctttgatgtcggaggaggatgccacgccggcggcatcattaaatcccgtcattcccgcaaaagcgggaatctagaactcaggaccggagaaacctttttacccgataagtttccgtgccgacagacctagattcccgcctgcgtgggaatgatgggattaaagtttcaaaatttattctaaataactgaaactcaacgaactagattcccgcttttgcgggaatgacgaattttaggtttctgtttgtgggtttctgttcttgtgggaatgatgaaattttaagttttaggaatttatcggaaaaaacagaaaccgctccgccgtcattcccgcgcaggcgggaatccagccttgtcggtacggaaacttatcgggtaaaaaggtttctctagtttggtgtcgattttcttgtcggtgctgttgacggcaggtgcttggtgttgattttgtcggtgtcgggtgtggcggcggtgacttcgtcggtgccggctttggcgttggcggcgttgcgcgtaaccggctgtccgcagaaccattttaccgaaccgtcttgacgcttggcccacagggagagttttttgccttggatttctttgtttacgccgcttgaaagcattgtggcggtaatgacgccgtttgcgactgtaacttccttaacatatttgcctttgattgttgaagaagatgccacgccggcagaagtgttgtttttcggccattcgccgtgattcgggtaatactcgggtgtttttgtgcaaacggcagatgctgcgtcgcggcaggttgacggcaggtgcttggtgttggttttcttgttgccggtgttgtcggcggcgacggtgtcgtcggtgccggcgcgcgtaaccggctgtccgcagaaccattttaccgaaccgttttgacgcttggcccacagggagagttttttgccttggatttctttgtttacgccgcttgaaagcattgtggcggtaacgacgccgtttgcgactgtaacttccttaacatattttcctttgattttagaggaggatgccacgccggcggcatcattaaatcccgtcattcccacgaaagtgggaatctagaactcaggaccggagaaacctttttacccgataagtttccgtgccgacagacctggattcccgcctgcgcgggaatgacgaagtttttcggccattcgccgtgattcgggcaatactcgggtgttttgtgcaaacggcagatgctgcgtcgcggcaggttgacggcaggtgcttggtgtcaatcttcttaccgttggcggcggcggcggcggtaacgtcgtcgttggcggctttggcgttgtcgcgctcaaccggctgtccgcagaaccattttaccgaaccggcttgacgcttggcccacagggagagttttctgcctttgatttctttgtttacgccgcttgaagccattatgtcagacggtattgcccgggcagctttattcgtacactttcagcagctcgacttcaaatatcaaagtggcgtgcgggggaatcacgccgcccgcgccgtgtgcgccgtagcccatttccgaagggatggtcagcttgcgtttgccgccttccttcatgccgccgaagccttcgtcccagcctttgatgacttgtccgacaccgagcgtgatggtcagcggctggcggcggtcgaggctggagtcgaatttggttccgttttccagccaacctgtgtaatgcacggtaatctctttgcctttaactgcttcttttccgaagccttcttgcaagtcttcaataatcaggccgcccatatttgtcctttcgttgcttgttggtcaaaacggcaagggtaacataccgtccgtcgaagtcaaatgccgctcaaacgtcagctgcatcggtgcagctgaaacggctgtgtttgtttgactgttttatttttttcgtaaaggttccatgctttttcatggaaatagaaaacgacggtgttgattaggggttcgaccagcgcaactgctcccgatacgcctatactgcccgtcagtacataggttacactgaaggcgacgctgaaatgcagtgcggcaaaagtcagggttttaagcatcatcctctcccggattggacattgacggagagatgataaagattatcataaggctgcgcggtttaaatttgctatttgttgttagtgtagataaatcgttttttaaataaggataggaattatgaatcataaaaagatcgttgttttggatgcggatactttgcccggccgggtttttcattttgattttccgcacgagcttgcggtttacggtacgacaggtgcggatgaaacggcagaacgggtgcgcgatgcacatattgtcattactaacaaagtgatgatttctgccgatattattgcggctaatccgcagttggagctgattgccgtcagtgcgaccggcgtgaacaatgtcgatattggggcggcgaaggcggccggtgttgcggtatgcaatgtccgcgcatacggaaacgaatcggttgcggaacacgcctttatgctgatgattgcgttaatgcggaatttgcctgcctatcagcgtgatgttgcggcaggattgtgggaaaagtcgccgtttttctgccattacggcgcgccgattcgggatttgaacggcaaaacgctggcggttttcggacgcggcaatatcggacggacgcttgccggatacgcgcaggcattcggtatgggggtggtgtttgccgaacacaaacacgcgtccgctgtgcgtgaaggctatgtttcctttgaagatgcggtacgggctgctgatgtgttgtcgctgcactgtccgctaaacgcccaaactgaaaatatgataggcgaaaacgaattgcggcagatgaagcctggcgcggttttaatcaattgtgggcgcggcgggctggtggatgaaaacgcgctgcttgccgcactcaaatacgggcagatcggtggggcaggtgtcgatgttttgacgaatgagccgcccaaaaacggcaatcccttgctgaatgcacgattacccaatctgattgttacgccgcataccgcgtgggcaagtcgtgaggctttggacaggctgtttgatatattgttggcgaacattcacgcctttgtgaaaggagaggcgcaaaaccgcgtggtttgaacctgtcgggattgcggaaaaaaatgccgtctgaacgcctcaagggttcagacggcatttcttgagattcccgtttaaccgactttgtcgcccggctgcgcgcctgtatccacatccaagagcttcagtttcccgtctgccgtggcggcactcaaaatcatgccttcagatacaccgaattttgccattttgcgcggggcgaagttggcgacggcgatgaccatgcggccgttcaattcggcagggttcgggtaagacgcggcgatgccggagaagatgatgcgtttttcaaaaccgaaatcgaggtcgaatttcaaaagtttggtgctgccttcgacagcttcgcagttcaatactttggcaacgcgcatgtcgattttcataaagtcgtcgaaactcgcctgttcggcgactttttcgtatttgccctcttcggcggcaggtgcggctgcggcggcgatgctttgtttgttggcttcgattaaatcgtccacttgtttttgctccactcgttgcattaaatgttcgtatttgttgatggcgtgtttgcccaaggtatcgcgtgtatttgcccaagtgatggcttccaaattcaggaatttggcggcgtttgcggcggtttgcggcaagacgggggcgaggtaggcggtcaacatggtgaaggcgttgatgagttcgctgcatacttcgtgcaggcgttcgtcttggccttcttgtttggcgagttcccacggcttgttggcatcaacgtattcgttgacaatgtctgccaaggccatgatgtcgcgcagggctttggcgtattcgcggctttcgtagcattcggcaatggcttcgctttgcgcagtcagttttgccagcaattcgctgtcggcaacatctttcagacggccttcaaagcgtttggcgatgaaacctgaggcgcgggcggcgatgttgacgtatttgccgacgaggtcgctgtttacgcggctgataaagtcttgcaggttcaaatcgatgtcttcgattttgctgttgagtttggcggcgatgtagtagcgcatccactcggggttcaggccttgttccagataggatttggcggtaataaacgtgccgcgcgatttggacattttttgtccgtcgacggtcaaaaagccgtgtgcgtacacgccggtcggggcgcggtggccggagaaatgcagcatagcgggccagaacagggcgtggaaatagagaatatctttgccgatgaagtggtacatctcggtttggctgtcggctttgaagtattcgtcaaaatcgacgccgatgcggtcgcacaggtttttaaacgacgccatgtagccgacgggcgcgtccagccagacgtagaagtatttgcccggcgcgtcggggatttcaaaaccgaaatacggcgcgtcgcgggaaatatcccagtcggacagggtggtttcttcaccttcgcccagccattctttcattttgttgagggcttcggcttgcagatggggcttgccgtcgtgcgggttgttgccggaagtccatgctttgaggaagtcggcgcattcgcccagtttgaagaagaagtgttcggattcgcgcaattcgggtttcgtaccggaaacggcggaatacgggttaatcagttcggtcggggaataggtcgtgccgcagacttcgcagttgtcgccgtattggtcttgggcgtggcatttcgggcattcgcctttgacgaagcggtcgggcaggaacatttgtttttcggggtcgaaaagctgctcgatgacgcggctctcaatcttgccgttggctttcagcgcgcggtaaatgtcttgggaaaactgtttgttttcaggggaatgggtgctgtaataattgtcgtaaccgatgaaaaagccagtaaagtcggcgaggtgctcttcgcgcactttggcaatcatgtcttcgggcgcgataccttgtttttgcgcggcaagcattacgggcgtgccgtgggtgtcgtcggcgcagcagtagtggcacgcgtggccgcgcagtttttgaaagcgcacccaaacgtcggtttggatgtgttcgaccatgtggccgaggtggatgctgccgttggcatagggcagggcggaggtaactaagattttgcgtgtcatattgtgctttgcaaacaatgggtaaaggcggattataccgcaaatcaaacggggaaatgccgtctgaagcctgaaaaatcgggcttcagacggcatttttgccaaccggcgggagttattcgacggttacggatttcgccaggttgcgcggcttgtccacatcggtaccgcgtgcgagggcggtgtggtaggcgaggagctgcacggggatagtatgcacgacgggggacagtttgccgacgtggcgcggtgcgcggataacgtgcacaccttcggtggcattaaaattgctgtcgaggtcggcaaagacgaaaagttcgccgccgcgcgcgccgacttcctgcatattggctttgactttgtccaacaggctgtcgttgggtgcgatgacgacgacgggcatattttcgtccaccagggcaagcggcccgtgcttcagttcgccggcaggataggcttcggcgtggatgtaggtgatttccttcagcttcaacgcaccttcgagggcaatcgggtaatggatgccgcgccctaaaaacagcgcgctggttttcttggcaaactgttgcgcccatgcggcaatttgaggttcgaggttcagagcgtgctgcacgctgccgggaagctggcggagttcttcggtgtaacgcgcttcgtcttcttcggaaaccaaaccgcgcactttcgccagcgttaccgccaaaccgaacagcgcaaccagttgcgtggtaaacgctttggtcgaggcgacgccgatttccgcaccggcacgggtataaagcacgaggctgctttcgcgcggcagggcggattccatcacgttgcaaatggagaggctgtggcggtgtcccaaggatttggcgtatttcaacgcctccatcgtgtccagcgtttcgccggattgggaaatggtaatgaccagttggtcggaatcagcaatcacgctgcggtatcggtattcgctggcgatttcgacgtcggacgggatttttgcgatggattccaaccaatatttggcggtcagcgcggcgtaataggacgtgccgcaggcaaggattttgacgctgcggatgctttcaaacacgcttttggcatctttgccgaagttttcggggatgaagccgccgtcgaggaaaacctccgccgtgtctgcaatcgcgcggggctgctcgtggatttctttttgcataaagtggctgtacagtcccagttccaaagaggcgagcgagagttcggataccttgactttgcgttcggcaggcaggccgtttttatcggtcagccttttgatgccgtctgaagccagcagcgcgatgtcgccgtcttcgaggtacgccacgcggcgcgtaaaggcgatgacggcggatacgtccgaagcgataaaggtttcatcgtcgcccaaagcgaccaaaagcgggcagcccatacgcgccacaactaattcatcaggcttgtcttgggcaataaccgcgatggcgtatgcgccgtggaaacgtttgaccgcttcttgtaccgcttcaaacagcctgccgccgttttgcgcgtattcgtgattgatgctgtgtgcgatgacttcggtatccgtttgcgattcaaaacggtatcccaaaccttccaaacgtttgcgttcgctttcaaagttttcgatgatgccgttgtgtacgaccgcaatcataccgccgctgatgtgcgggtgggcgttcggctcagtaacgccgccgtgtgtcgcccaacgcgtatgtccgatgccgatgccgccgctgatgcctttttcgcgtgccgcgtcctccataagctgcacgcgtccgacgcggcgcacacgtttgattttgccgtcggtgttgacggcaatgcctgatgagtcataaccccggtattcgaggcgtttgagaccgtcggtcagaaaatcgacgacgttgtgatgggcgcggatggcgccgacgataccgcacataactgttccttagtatccggttgaaaaaaaacaggcgcggacggcttccgtgccgcaccttcctcttcggattataaaccgcctcccgcgccggaaaacagcaaaatgccgtctgaaggcttgggcttgctcaaaaaaaggagggatttccctgtttatccaggatgggcgttcagacggcattacctgctgctggtttatagtttttgcaaatcaacattgacaagctgaaaaaaaaaaacaatatactcgctcggtcttaatgttaacggagtatggaaatgaaacaaatgcttttagccgtcggcgtggtggcggtgttggcgggctgcggcaaggatgccggcggttacgagggttattggcgcgaaaagtcggacaaaaaagagggtatgattgccgtcaaaaaagaaaaaggcaattacttccttaataaaatccacgtggttacaggcaaggaagagtccttgcttttgtctgaaaaagacggcgcgctttcgataaacacagggataggggaaatcccgatcaaactttccgacgacgggaaagagctgtatgtcgaacgtaggcagtatgtcaaaaccgatgcggcgatgaaggacaaaatcatcgcccatcagaaaaagtgcggacaaacagcacaggcataccgcgacgcgcgaaatgcgttgccgtcaaaccagacgtatcagcagcatctggcggcgatcgagcaattgaaacggcggtttgaagccgagtttgacgaattggaaaaagaaatcaaatgcaacggcagaagcccggcattgttgctttagtaggggacaaccgggaggatgccgccgtccgaatcggatgtgcggtttctgtaccggtacgggcgggcaggaatgtccgccttttttgttcggatgcgtttgaatacccgtttgattccgaccgtttgcaaggggtatttccgttcgggcggaaattatagtggattaacaaaaaccagtacggcgttgcctcgccttagctcaaagagaacgattctctaaggtgctcaagcaccaagtgaatcggttccgtactatttgtactgtctgcggcttcgtcgccttgtcctgatttaaatttgatccactataattccgtcaaataagaaaggaattttgtgcctgcggtatcgcaaaacttcgccttaatgcgcccgattgcctagggatgggcttcagatggcattgttttccggtttacgggcggtattcgggcttcataccgttgggtaggagctgccagacatatcccgtggttttctgtttgccggcaagttcgccggcttcgtcgccgtatccccaaaaataatccacgcgcaccgcgcctttaatcgcgctgccggtatcctgcgccataatcaggcggttgagggctttgcgggtaaccggatgggcggtggcgacaaataagggcgcacccaaggtaatgtagtgccggtcgactgcgccggcatattcccccatcagcggcgtgcccagtgcgccgacagggccgtcattgctgcttccggcaagctcgcggaaaaagatatagctggggttttgacccaaaacttcggcgaggcgttgcggattttgccgcatataagacttaatgccctgcatggaggtttgtccgagtttgaggtagcccttatccgccatatagcgtccgatggaaacgtagggatgttcgtttttgtcggcatagccgatgcggatgtatttgccggacggggttttcagacggcccgagccttggatgtgcataaaaaaaagttcgacagggtcttcggcgtaaccgagtatcggggctttgccgtcaagcgcgccgccgttgatttggttgcgcgtgtggtaggggaggaagcggcttccttcaaacctgcctttgattgctgttgtgcgcgcggtgatggggaatcgggagaggtcggcggtatgtgtgccgccggtattgtcgattgtgccgctgttttttcccgtctgcctgatgcggacaagggcttttccgctccgcaaaccggcaggcagggggacggagataaaatcgtcgggaataccgtaaatcgggaagcgggcttgtgccgtccgcctgtcgtcgcccttcagcaccggttcgtaatagccggtaaccgtaccggcaaggcttccgttgcctgcaacctgccacggcgtgaaatagcgttcaaaaaactgttttgcctgaaaggaatggacgggggtttgaaaggcttgggcgcacacatcctgccagccttggcggtttttcaaattggcgcagccgaggcggaaggattgcaggcttttggcgaaatcctgcgccgcccagtggggcagggacaggtgcggtacaacggtatagacggccccgccgccgccgaccgtcgttccggcggggtcggggatgccgaccggccggtccgggccgttgatgacggatgtgtcgggttgcggaaaggtttggatgctcttgctttggcaggcggcgaggatggcggcggcgatgccgtacagggcggcgcggaataggtattttttcataatggacaatgttgccggcagtaataagaaagatggtttcgggcggcgttgcggcagccgtggagaggggattttaacacagggcgcagctgcagcctgcggaactttccgccgcgcggtactgcagataaaaataacttgcatttgtatttacaagcaatgaaaatattccgataatatattattcatcatccttgttcgttcgcgtttatgctggtcgcttttttaattatgttgcgcgagggtattgaagccgcgctcattgtcggcatcgttgccggttttctgaaacagtccggacattccaaactgatgcctaaggtctggttcggggtcgtccttgcttctttgatgtgtttggggctggggtacggcatccattcggcaacgggcgagattccccagaagcagcaggagttcgtcgtcggcattatcggtttggttgccgttgccatgctgacttatatgattttatggatgaaaaaggcggcgcgttcgatgaagcggcagcttcaggattctgtgcaggcggctttgaaccgtggcagcggtcaaggatgggccttggtcggtatggcgtttcttgccgtggcgcgcgaaggtctggagagtgtttttttcctgcttgccgtattcaaacagagcccgacgtggcagatgccggccggcgcggtagcgggggttttggctgccgccgtgattggcgcgttgatttatcagggcgggatgcgcctgaatctggcgaagtttttccgttggacgggggcgtttctgattgtcgttgccgccggcctgcttgccggctcgctgcgcgcgctgcatgaggcaggtatttggaacgcgcttcaggacattgtgttcgactcatcaaaatatttgcacgaagacagtccgttgggcgtgctgctcggcggatttttcggctataccgaccatccgacgcagggcgagaccttggtttggctgctgtaccttattcccgtcataacttggtttttgtgcggcagcaggccgtctgaaactttaacccgtaaagaggagctgaaatgagaaaattcaatttgaccgcattgtccgtgatgcttgccttaggtttgaccgcgtgccagccgccggaggcggagaaagctgcgccggcagcgtccggtgaggcgcaaaccgccaacgagggcggttcggtcagtatcgccgtcaacgacaatgcctgcgaaccgatggaactgaccgtgccgagcggacaggttgtgttcaatattaaaaacaacagcggccgcaagctcgaatgggaaatcctgaaaggcgtgatggtggtggacgagcgcgaaaacatcgcccccggactttccgataaaatgaccgtcaccctgttgccgggcgaatacgaaatgacttgcggtcttttgaccaatccgcgcggcaagctggtggtaaccgacagcggctttaaagacaccgccaacgaagcggatttggaaaaactgtcccaaccgctcgccgactataaagcctacgttcaaggcgaggttaaagagctggtggcgaaaaccaaaacttttaccgaagccgtcaaagcaggcgacattgaaaaggcgaaatccctgtttgccgacacccgcgtccattacgaacgcatcgaaccgattgccgagcttttcagcgaactcgaccccgtcatcgatgcgcgtgaagacgacttcaaagacggcgcgaaagatgccggatttaccggctttcaccgtatcgaatacgccctttgggtggaaaaagacgtgtccggcgtgaaggaaattgcagcgaaactgatgaccgatgtcgaagccctgcaaaaagaaatcgacgcattggcgtttcctccgggcaaggtggtcggcggcgcgtccgaactgattgaagaagtggcgggcagtaaaatcagcggcgaagaagaccggtacagccacaccgatttgagcgacttccaagccaatgtggacggatctaaaaaaatcgtcgatttgttccgtccgctgatcgaggccaaaaacaaagccttgttggaaaaaaccgataccaacttcaaacaggtcaacgaaattctggcgaaataccggactaaagacggttttgaaacctacgacaagctgggcgaagccgaccgcaaagcgttacaggcctctattaacgcgcttgccgaagaccttgcccaacttcgcggcatactcggcttgaaataagccgcaagcgttcagacggtatttggcggcagataccgtctgaagttttatagtggattaacaaaaaccagtacggcattgcctcgccttgccttgccgtactatttatactgtctgcggcttcgtcgccttgtcctgatttttgttaatccactatatccgccatatattgcagggcgggatttcaacctgccgctatcggttaatggaaaaacggcgtgcagggatacccatcctgctgcacggatattgaaggaaacaccatgagcaaaaaacaacccgcacaaccgaccaggcgcactctttttaaaaccgcgatcgcagccggagcagtcggcgcaatcggaggttatctcggcggcaaaaaacagggcgaaaccgccgaacgcaccgccgaaagccaacactcgccccaagcctatccctgctacggcgaacatcaggcaggcatcgttacgccgcagcaggcgttttcgattatgtgcgccttcgacgtaaccgcgcaaagtgccaagcagctggaaaacctgttccgcacgctgaccgcccgcatcgagtttctcacccaaggcggcgaataccaagacggcgacgacaaacttccgccagccggcagcggcattttgggcaaagccttcaaccccgacgggttgaccgttaccgtgggggtgggcagcagcctgtttgacggccggttcggactcaaagacaaaaaaccgattcatttgcaggaaatgcgcgacttctccaacgataagctgcaaaaaagctggtgcgacggcgatttgagcctgcaaatctgtgccttcacccccgaaacctgccaagccgccctgcgcgacatcatcaaacacaccgtccaaaccgccgttatccgttggagtatcgacgggtggcagcccaaatccgaacccggcgcgatggcggcgcgcaacctgttgggcttcagggacggcacgggcaaccccaaagtttccgatcccaaaactgccgacgaggttttgtggacgggggtggccgccaacagcctcgacgaaccggagtgggcgaaaaacggcagctatcaggcagtccgccttatccgccactttgtcgagttttgggacaggacgccgcttcaagagcaaaccgacattttcgggcggcgcaaatacagcggtgcgccgatggacggcaaaaaagaagccgaccaaccggattttgccaaagaccccgagggtgatatcacgcccaaagacagccatatacgcctggcgaatccgcgcgatcccgaattcctcaaaaaacaccgcctcttccgccgcgcctacagctattcgcgcggactcgcctcaagcggacagcttgatgtcgggctggtgttcgtctgctatcaggcaaaccttgccgacggattcatcttcgtgcaaaacctcctcaacggcgaaccgctggaagaatacatcagccccttcggcggcggctatttcttcgtcttgcccggcgtggaaaaaggcggctttttggggcaagggctgctgggcgtataaatccgccatataaaaaacgccgtccgaaccttgccaaacgggttcggacggcgtttcttgtttttgggcggtcaggcttttttgacgaattcggattttaaattcatcgcgctgccgtcgattttgcagccgatgttgtgatcgccttcttgcaggcgtatgcctttgacttttgtgccttgtttgatcaccatcgagctgccttttaccttgaggtctttgatgaggatgacggtatcgccgttttgcagcactgcgccgttggcatcgcgcacttgagccgcaaggtcggcggcggattcggtttcattccattcatgggcgcattcggggcagatgtattgtccgccgtcttcataggtgtattcggaggcgcattgcgggcatgggggtaatgacatggtttgccgtccttatcggatgtttgttttggggtgccgtctgaaacctgaaaccggcttcagacggcatagctttattgtttgtctttttcaggacgcacccagccttcgatgacggtttggcgggcgcgggcgagggcgagtttgttgtcttcgacattgcgggtaatcgtgctgcccgcgcctgtggttactttgttgccgagggtaacgggggcgactaggacgcagtttgaaccgatgcgcacttcgtcgccgatgacggttttgtgtttgtgcacgccgtcgtagttggcaataatcgtaccggcgccgaagttggttttgcagccgacttcggcgtcgccgatgtaggtgaggtggttggctttggtgcctttgccgatggcggcgtttttgatttcgacgaagttgccgacgtgtacgtcgtctgcaaggcgggcttgcggacgcaggcgggcgtacgggccgattcggttgttttcgccgacttcgcagctttcgaggtgggagaagggggcgattttgctgtttgcgccgattttggcgtttttgatgacgcagtttgcgccgatttcgacgttgtcgccgagctcgatgtcgccttcaaagatacagttcacatcaatcacgacgtcttgcccgtgtttcagacggcctcgtaaatcgaaacgtgccggatcgcgcagggttacgcctgctttgagcaattcttgcgcctgttcggtttggaagatgcgttcgagttcggtgagctggagtttgttgttcacgccggcggcgaggtgggaggcgcgcacttggacgggatgaactttaataccgtcggcaacggctttggcgatgaggtcggtcaggtagtattcgccttgtgcattgttgctggaaaggctgttcagccagttttcgagtttggcgttgggcaggacgaggatgccggtattgatttctttcacggctttttggacggcgtcggcgtctttttcttcgacgatggcggttacgctgccgttgctgtcgcggatgatacgccccaagcctgtcgggtcgttgggaacgtcggtcaacagcccgacttcgttgcctgcggcttcgagcagggtttcgagggtttcaacgtcaattaaaggaacgtcgccgtacaacaccagcgtgcggccttcggcggaaaggtggggcagggcggttttgacggcgtggccggtaccgagctgttcggtttgttcaacccaaacgacatcgcgtttgacggtgtccaagacttgctctttgccgtggccgatgacgacgcagatgttttgcggattcagtgcggctgcggtgtcgataacgcgcccgaccatgggcttgccgccgatgcggtgcagcacttttggcattttggaatacatgcgcgtgcctttgccggcggcgaggatgacgatgtttaaagtgttttgcggcatgacggtttcctgtgcaatgccgtctgaagcggcttcagacggcatagggtaggtttatcggttttgaaactttggtttttgccagtgttggcgatgctcttcgtcggcgttgttgccggtttgattgggtaacacggcatggcgttcgggacggtattggttgtagttcatatttttcgagtagctgccgtcttggtaataaacgggcgtgccggcgggatatttttgacggacggcggtcttgccgttgccgtcttgataagtttcccacgcgcagcccgacaaaagggcggcggcagcggtcaggaagaggaaggttttacgcatggcttttctttcgtattttcggggggtagggggtattgtaatgattttggcggtgttctgacaaagtttctgcataccgagccagttgcgccatatcgcttacggaggcatcgataaagggcagcgcgtgggattttgcaccgaaccggacggttttcatacccagcgcctttgcctgatgcaggttgtccgcgctgtcgtccaccataatgcagcattcgggcggtacgtccaacaggcggcagacattgagatacgcttgcggattgggtttgtacagcagcccgaaatcatccgtgccgaaaagcgcgtcgaaacggttttccaaaccgagtgcgttgacaacggcacggacgtaaaacgacgggccgttggaaaaaaccgccttgcgcccttttaggcggctcagggtgttttgtgtttcaggcatgccgtgcagcctggtcaggattgcatcgatcggatggctttcgcgcaaaaattcggcgatgtcgatttcgggatggtggatttgcagtccggcgagcgttgcgccgtagcggtgccaatagtcttgacgcaggtcggacgcggcagattcggagagtttgaggcggcgtgccatatagcgtgtcatagcgcggttgatgagtgtgaagatgcctgcgtcggcatcgtgcagcgtgttgtcgaggtcgaacagccacacggtcgggttttcttgcatgttgaaccgtgaaaatttgttagaatgttattttacagcgaatagaggaggactcggaatgaaacggaaaatttggctgctgccgctgctggcggtttcggcatacctgcaggcgcagacggaagtcaggctggcggtgcataagtcgttcagcctgcccaaagggttgattgcgcgcttcgagcgggcaaacgatgcgaaggtgtcgattattcaggcgggcggcgcgaacgaaatgctcaacaaactgattttgagccgcgccaacccgattgccgacgcggtgtatggtttggacaacgccaatatcggcaaggcgcgggaaatgggcattttggcggcggcgcaacccgaatccgcccccgtcgcggtcgggctgccttcggctttggcggtcgattacggctatgtgtccatcaattacgacaaaaaatggtttgaaggcaaaaagctgcccctgccgcaaaccctgcaggatttgacccgccccgaatataaaaacctattggtcgtgccgtcccccgccacgtcgtccccggggctgggcttcctgatggcgaacatcagcggtctgggcgaagaaagcgcgttcaaatggtgggcacagatgcggcagaacggcgtgaaggtcgccaaaggctggagcgaggcgtattacaccgacttttcgcacaacggcggcgcgtatccgctggtggtcggttatgccgccagcccggcggcggaagtgtatttttccaaaggcaaatacagcgagccgccgacgggcaacctgtttttaaaaggcggcgtattccgccaggtcgaaggcgcggcggtcttgaagggcgcgaaacagccggaattggcggcaaaactggtgcaatggctgcaaagtcgggaagtgcagcaggcggttccgtccgaaatgtgggtttaccccgccgtcaaaaacacgcgcctgcccgacgtgttccgcttcgcccaagccccgacgcacaccaccgcccccgcgcagcgcgatattgatgcgaaccagcgcggatgggtttcccgttggattagaacggttttgaaataaaacaaacatacctccccgcagggcttcatacggcatttttacacctgtgccgattacgccgcacggggcggatgttcgatcaagaggaaaacaatggacttcaaacaatttgattttttacacctgatcagtgtttccggttgggagcatctggctgaaaaggcgtgggcgttcgggctgaaccttgccgccgcgctgcttatttttttggtcggaaaatgggcggcgaaacgcattgtcgctgtgatgagggcggcgatgacgcgcgcgcaggtcgatgccacgctgattagttttttgtgtaatgttgccaatatcggcttattgattttggtgattattgccgcattgggcagattgggcgtttccacaacatccgtaaccgccttaatcggcggcgcgggtttggcggtggcgttgtccctgaaagaccagctgtccaattttgccgccggcgcactgattatcctgttccgcccgttcaaagtcggcgattttatccgcgtcggcggttttgaaggatatgtccgagagattaaaatggtgcagacttctttgcggacgaccgacaacgaagaagtcgtgctgcccaacagcgtggtgatgggcaacagcatcgtcaaccgttccacactgccgctgtgccgcgcccaagtgatagtcggcgtcgattacaactgcgatttgaaagtggcgaaagaggcggtgttgaaagccgccgtcgaacaccccttgagcgttcaaaacgaagagcggcaggctgccgcctacatcaccgccttgggcgacaatgccatcgaaatcacattatgggcttgggcaaacgaagcagaccgctggacgctgcaatgcgacttgaacgaacaagtggtcgaaaacctccgcaaagtcaatatcaacatcccgttcccgcaacgcgacatacacatcatcaattcttaaacgccgtctgaaagaggagtgggaaatggacgcgctgcacaccatcgcccgaaacctgacgaaaaaacgtcaaaccgtaagctgtgccgaatcctgtacgggcggaatgcttgccgccgcattcacaagcgttgcaggcagttcgcaatggttcgaccagagttttgtaacatacagcaacaaagccaaagaagaccgcttgggcgtgttgcccgaaaccctgctcgaacacggcgcggtcagccgccaaaccgtctatgagatggcgcgcggcgcgaaagccgtggcgcaggcggattacgccgtcggtatttccggcatcgccggtccgggcggcggcagcgaaagcaaacccgtcggcacggtttggttcgggtttgcctttccgggcggaagttgcgaagcaatgcgccgttttgacggcaaccgcgaatccgtccgcgcgcaggcggtcgccttcgcgttggaacggttggcggggctgattgaaaacggcggcgatgctgtctaaacaaaatctccgtctgaacaaaatccccatcggataaaaaatgccgtctgaaacgtttcgggtttcagacggcattttgtcggggtaggcggcggtgcggcttatttcactttacctttcaacgcgccatagcctgccgcgtccatttgttccagcgggatgaatttcaagctcgcgccgttgatgcagtagcgcagtccgcctttgtcgcgcgggccgtcggggaagacgtgtcccaaatgcgagtcggcggcgtggctgcgcacttcggtgcggcgcatgttgtagctgaaatcatcgtgttcggtaacggattttgcatcaatcgggcgcgtgaagctcggccagccgcagccggaatcatatttgtcggcggagctgaacaaaggttcgccgctgacaacgtccacataaatgccgggtttgaacaaatggtcgtattcgtggctgaaggcatattcggtcgcgctgttttgggtaacttggtattgctcttcggtcagggtgcgtttgagttcggcgtcactcggttttttatacgttgccgcgtcgaagcctttgccttgcggggcggtcttggttttgcccggcagcggttcgtcagctttgcggatgtcgatgtggcagtagccgttggggtttttaatcaagtagtcctgatggtattcctcggcatcgtagaagtttttcagcggctcgttttcaacaacgaggggcagttggtatttttgctgctcgcgtttgagggcggcggcgatgacggctttttcggcggggtcggtgtagtacacgccgctgcggtattgcgtaccggtgtcgttgccctgtttgttgaggctggtcggatcaacgacgcggaagaaatattgcaggatgtcgtctaggctgagtttgtcggcatcgtaggtcactttgacggtttcggcgtggcccgtatggcggtaggacacgtcttcatagctcggatttttcgtgttgccgttggcgtagccggataccgcgtcaaccacgccgtcgatgcgttggaaataggcttccaagccccagaagcagccgccggcgaggtaaatggtgcgcgtgttcatgatttttgaatcctttttctgagtgtcgggtttgtagaacgaatgtttcaagctgcccaaatcggcattcgggtcgcggattaacgccaacgcctgcgcttcgttgatgctgcctttgacgatgcgctgcacgtcgctgtctttaccgattaacgcccacgaggggtaaacgctgatattcaggctttgggcgatcgtgccgccgttgtcggttacgacgggcagcttgggataattcaaaccggcataccatttttggaagtcgccgtcttttttctcgtgcaaaaagcccggggaggcgacggtaatcaggttggcggagctgaattttgcatcttgcgcccatttttcggtctgtcccaattcggacagacacaaaggacaccagctcgcccaaaatttaatcagcgtcggtttgtcttttttcaagtaaacactggcggggcggttgtccgcagttttcaaagtggataaagtgtgcggcacggtcgcggctccggcatcgacgattttgggcgaacaagcacccagcgcaagcaggcagccgaacttggcgcaaagggaaaagaaagtacggtgtttcattttgatgtttcctgtgtggacggtttgcatgattagacgtttgagatgccgaaaccttacagcccggattttcagacaaccttaccgcgtaaaatacgctacaatacgccctgtttcaagtttctaaaattaaaaggaaaattcaatgttcagcttcttccgtcgcaagaaaaaacaggaaacgccggctctcgaggaggctcaaattcaggaaaccgcagcaaaagcagaatctgaacttgctcaaatagttgaaaatattaaagaagatgctgaatctttagcagaaagcgtcaaagggcaggtcgaatctgccgttgaaaccgtcagcggtgcggttgaacaggtaaaggaaaccgttgccgagatgctgtctgaagcagaggaagcggcggaaaaagcagcggaacaagtcgaagcggcaaaagaagccgttgccgaaaccgtcggcgaggctgtcgggcaagttcaagaagccgttgcgacaactgaagaacacaagctcggttgggcggcgcgtttgaaacaaggcctgaccaaatcgcgcgacaaaatggcgaaatcgctggcgggcgtgttcggcggcggacaaatcgacgaagatttatacgaagagctggaaaccgtgctgattaccagcgatatgggcatggaagccaccgaatacctgatgaaagacgtgcgcgaccgcgtcagcctcaaagggctgaaagacggcaacgaattgcgcggcgcgttgaaagaagccttgtacgacctgattaagcctctggagaaacctttggttttgcccgaaaccaaagagccgtttgtcatcatgcttgccggcatcaacggcgcgggcaaaaccacgtctatcggtaaactcgccaaatatttccaagcgcagggcaaatccgtattgctggcggcaggcgatactttccgtgccgccgcgcgtgagcagcttcaagcttggggcgagcgcaacaacgtaaccgtgatttcgcaaaccacgggcgattccgccgccgtgtgcttcgatgccgtccaagccgccaaagcgcgcggcatcgacattgtgctggccgacaccgccggccgcctgcccacgcagcttcatttgatggaagaaatcaaaaaagtgaaacgcgtgctgcaaaaagccatgcccgacgcgccgcacgaaatcatcgtcgtgcttgatgccaatatcgggcaaaacgccgtcaaccaagtcaaagcctttgacgacgcattggggctgaccggtttaatcgttaccaaactcgacggcacggcaaaaggcggcatcctcgccgcgcttgcctccgaccgccccgttcccgtccgctatatcggcgtgggcgaaggcatagacgacctgcgcccgtttgacgcgcgcgcgtttgtggacgcactgctggattgagccgaaatgccgtccgaaaacagcagaccgatgccgtcattcccgcgcaggcgggaatccagaccttgggataacggcaatattcaaaggttatctgaaagtccgagattctggattcccactttcgtgggaatgacgggatgtaggttcgtgggaatgacgtggtgcaggtttccgtatggatggattcgtcattcccgcgcaggcgggaatctagaacgtaaaatctaaagaaaccgtgttgtaacggcagaccgatgccgtcattcccgcgcaggcgggaatctagaccattggacagcggcaatattcaaagattatctgaaagtccgagattctggattcccactttcgtgggaatgacgggatttgagattgcggcatttatcggaaaaaacagaaaccgctccgccgtcattcccgcgcaggcgggaatctaggtttgtcggtgcggaaacttatcgggtaaaacggtttctttagattttgcgttctagattcccactttcgcgggaatgacgaagagttgcgggaatgatggaaagctatgggaataacgaagggttaaagtaatcacgggatggtgttcgcgggaatataaattgaaataattcaaaagggtattatatgcagcctgcggtttatattttagcaagccaacgtaatggcacgttatacattggcgttacatctgatttggtgcaacgtatttaccaacatagggagcatttgattgagggatttacatcacggtacaacgttactatgctggtttggtatgaactgcatcctacgatggagagtgcaattactcgggaaaaacagttgaagaaatggaacagggcttggaaattgcaactgattgaagaaaataatgtttcttggcaggatttatggtttgatattatttagcccgtcattcccgcgcaggcgggaatccggcttgttcggtttcggttttttttttgaggtttcgggcaacttctaaaccgtcattcccgcgtaggcgggaatctagaccttgggataacggcaatattcaaagtttataaaagacccgttattcccgcgcaggcgggaatctagaccttagaacaacagtaatattcaaaggttagctgaagctttagagattctagattcccactttcgtgggaatgacgggatgtaggttcgcgggaatgacgggatttgagattgcggcatttatcggaaaaaacagaaaccgttctgccgtcattcccgcgcaggcgggaatccggcttgttcggtttcggtttttttgaggtttcgggcaacttctaaaccgtcattcccgcgcaggcgggaatctagaccattggacagcggcaatattcaaagattatctgaaagtccgagattctagattcccactttcgtgggaatgacgggatgtaggttcgtgggaatgacgggatttgagattgcggcatttatcggaaaaaacagaaaccgctctgccgtcattcccgcgcaggcgggaatccggcttgttcggtttcggttttttttttttttgaggtttcgggcaacttctaaaccgtcattcccgcgcaggcgggaatccagaccattggacagcagcaatattcaaagattatctgaaagtccgggattctagattcccactttcgtgggaatgacgggatgtaggttcgtgggaatgacgggatttgagattgcggcatttatcggaaaaacagcaaccgctccgccgtcattcccgcgcaggcgggaatctagaccttgggataacagcaatattcaaaggttagctgaagctttagagattctggattcccactttcgtgggaatgacggaatgtaggttcgtgggaatgacgggatttgagattgcggcatttatcggaaaaacagcaaccgctccgccgtcattcccgcgcaggcgggaatctagaccttgggataacagcaatattcaaaggttagctgaagctttagagattctggattcccactttcgtgggaatgacggaatgtaggttcgtgggaatgacgggattagagtttcaaaatttattctaaatagctgaaactcaacgcactggattcccgcctgcgcgggaatgacgaattttaggtttctgattttggttttctgtttttgagggaatgacgggatttgagattgcggcatttatcgggagcaacagaaaccgctccgccgtcattcccgcgcaggcgggaatctagaccttagaacaacagcaatattcaaaggttagctgaagctttagagattctagattcccactttcgtgggaatgacggaatgtaggttcgtgggaatgacgcggtgcaggtttccgtatggatgggttcgtcattcccgcgcaggcgggaatccggcttgttcggtttcggttttttttttttgaggtttcgggcaacttctaaaccgtcattcccgcgcaggcgggaatctagaccttagaacaacagcaatattcaaagattataaaagacctgtcattcccgcgcaggcgggaatctaggtctgtcggcacggaaacttatcgggtaaacggtttcttgagattccgcgtcctggattcccactttcgtgggaatgacgggatgtaggttcgtgggaatgacgcggtgcaggtttccgtatggatgggttcgtcattcccgcgcaggcgggaatctagaccttagaataacagcaatattcaaagattatctgaaagtccgagattctggattcccactttcgtgggaatgacggaatgtaggttcgcgggaatgacgcggtgcaggtttccgtgaggatggattcgtcattcccgcgcaggcgggaatctagaccttagaacaacagcaatattcaaagattataaaagacctgtcattcccgcgcaggcgggaatccagaccttagaacaacagcaatattcaaaggttagctgaagctttagagattctggattcccactttcgtgggaatgacgggatgtaggttcgtgggaatgacgcggtgcaggtttccgtgcggatggattcgtcattcccgcgcaggcgggaatccagaccttgggataacagcaatattcaaaggttataaaagacccgtcattcccgcgcaggcgggaatctagaccttagaacaacagtaatattcaaaggttagctgaagctttagagattctggattcccactttcgtgggaatgacgggattagagtttcaaaatttattctaaatagctgaaactcaacgcactggattcccgcctgcgcgggaatgacgaattttaggtttctgattttggttttctgtttttgtaggaatgatgaaattttgagttttaggaatttatcggaaaaaacagaaaccgctccgccgtcattcccgcgtaggcgggaatccagaccgttgggcatctgcagcggtttgctaaaaaccgctttactgtgataagtgcgcagggttagaatggcgcggtaaccttatatattgtaccccgtcaaaggggcgcattgcttttcttaacattcccctttggcagccaagtgaaagggcttttcaatcagcaattcggcgggcgcggaatcgggcggtttaccgaaccccggcgttcgcggcgcgccgccccgtcccgtgaaggcaaactcaaggaataaaagatgaataaaacttggaaacggcaggttttccgccataccgcgctttataccgccatattgatgttttcccataccggcgggggggggggcaggcgcaagcgcaaacgcaaacgcaaacgcataaatacgctattgtaatgaacgcgcaaaatctgcccgaggtaaagtggggggatcaatatcagtcattgacgcacaaaagcaatgaacgcgaagttatccatacgagtggttttggtttggcaaaaaagagcattagtttctcattcaataataccgatgaagttgttgctgaaaaaaaagatactgtcgttttcggcgcggcgacctacctgccgccctacggaaaggtttccggttttgataccgctaagctgaccgagcgcaaaaatgcccttgatcagattggtacgaccaaaacggggctggtaggctacagctacgaaggtagcacatgctccagcggaggttgtcctacagttgcctatagaacccaatttaccttcggcaattccagtttggcaaaaaaggcaaacggcggcgggctggatatatacgaagacaaaagccgcgacaattcgcccatttacaaattgaaggatcatccttggttgggcgtgtctttcaatttgggcggagagagctccttcaaaccaaagagacaaggttctttggtatcttcttttagcgaggacgtgacgcagcaaaatggtgcgggcagccaacacaaagacaaaaacctcgtttatacgacagacgattacaagagtcagaataataaaaaccatcaggacaaacaccacgccgtcgccttttatctgaacgccaagctgcacctgctggataaaaaacacattaaaaatatcgtgcaaggtaaaacagttaatttgggtatcttgaaaacacgcatcgagccgacggaagcatggaaaagacggaatagtaacttttttaacggtagttggacgtatgaagagaaaggaacagtcagcgtcaaactcaaattgccggaagtcaaagcaggccgctgcatcaacgcaaataaccccaataagagtaccaaagccccttcccccgcactgactgcccccgcgctgtggttcggacctgtgcaaaatggtaaggtgcagatgtattccgcttcggtttccacctaccccgatagttcgagcagccgcatcttccttcaaaatctgaaaagaaaaaccgaccccaacaaacccggccgccattccctcgcagacttggctaagtcggatattgaaaatcgacagccgaatttcacagggcggcaaaccatcatccgattggatggcggcgtacagcagatcaaactgggtagaaacaatgatgaggtcgccaattttaatggaaatgacggcaaaaacgacactttcggcattgttagtgaagggagcttcatgcctgatgccagcgagtggaaaaaagtattgctgccttggacggttcgtgcttccaatgatgacggtcaatttaacacattcaacaaagaagaaaaagacggcaagccaaaatacagccaaaaataccgcagccgcgacaacggcaagcacgagcgcaatttgggcgacatcgtcaacagccccatcgtggcggtcggcgagtatttggctacttccgccaacgacgggatggtgcatatcttcaaacaaagcggcggggacaagcgcagctacaatctgaagctcagttatatcccgggtacgatgccgcgcaaggatattcaaaacaccgaatccacccttgccaaagagctgcgcgcctttgccgaaaaaagctatgtgggcgaccgctacggcgtggacggcggctttgtcttgcgcaaagtcgaacggaacgggaaagaccatgtgtttatgttcggcgcgatgggctttggcggcagaggcgcgtatgccttggatttaagcaaaatcgacagcggcaacggcaacctggcagacgtttccctgtttgatgtcaaacatgacaagaatggcaataacggcgtgaaattaggctacaccgtcggcacgccgcaaatcggcaaaacccacgacggcaaatacgccgctttcctcgcctccggttatgcgactaaagacattaccagcggcgacaataaaaccgcgctgtatgtgtatgatttggaaagcagcggcacgctgattaaaaaaatcgaagtacccggtggcaagggcgggctttcgtcccccacgctggtggataaagatttggacggcacggtcgatatcgcctatgccggcgatcgcggcggcagtatgtaccgctttgatttgagcaatcaagatcctaatcaatggtctgtacgcgccatttttgaaggcacaaaaccgattacttccgcgcccgctatttcccaactgaaagacaaacgcgtggttatcttcggcacgggcagtgatttgagtgaggatgatgtactcagtacgagcgaacaatatatttacggtatcttcgacgacgatacggtggcgaataacgtaaatgtaaaactcagcggtttgggaggcgggctgctcgagcaagagcttaagcaggaggataaaaccttattcctgaccgattacaagcgatccgacggatcgggcagcaaagggtgggtagtgaaattgaagggcggacagcgcgttaccgtcaaaccgaccgtggtattgcgtaccgcctttgtaaccatccataaatatacgggtacggacaaatgcggcgcggaaaccgccattttgggtatcaataccgccgacggcggcaagctgaccaagaaaagcgcgcgcccgattgtgccggccgagaatcaggctgtcgcgcaatattccggccataagaaaggcatcaacggcaaatccatccctataggttgtatgcaaaaaggcaatgaaatcgtctgcccgaacggatatgtttacgacaaaccggttaatgtgcgttatctggatgaaaagaaaacagacggattttcaacaacggcagacggcgatgcgggcggcagcggtatagaccccgccggcaagcgttccggcaaaaacaaccgctgcttctcccaaaaaggggtgcgcaccctgctgatgaacgatttggacagcttggacattaccggcccgacgtgcggtatgaaacgaatcagctggcgtgaagtcttctactgatttgcacgcgaaaatgccgtccgaaaggttttcggacggcattttttgcgtttttcgggaggggcgggttcgtaaaaggcgggctatagggtaggcttcatctcgccaatctcactgaatccatcaatttccacaattcaattaaataccgtcaaaccgatgccgtcattcccgcgcaggcgggaatctagaccttagaacaacagcaatattcaaaggttagctgaagctttagagattctggattcccactttcgtgggaatgacgggatgcaggtttccgtatgaatggattcgtcattcccgcgcaggcgggaatccagaccttagaacaacagtaatattcaaagattatctgaaagtccgagattctggattcccactttcgtgggaatgacgggattttaggtttctgattttggttttctgtttttgtaggaatgatgaaattttgagttttaggaatttaccggaaaaaacagaaaccgttctgtcgtcattcccgcgcaggcgggaatctagacattcaatgctaaggcaatttatcgggaatgactgaaactcaaaaaactggattcccactttcgtgggaatgacgggatttgagattgcggcatttatcgggagcaacagaaaccgctctgccgtcattcccgcgcaggcgggaatccagaccttagaacaacagtaatattcaaagattatctgaaagtccgagattctggattcccgcctgcgcgggaatgacgaattttaggtttctgattttgtttttctgtttttgtgggaatgatgaaattttgagttttaggaatttatcggaaaaaacagaaaccgctctgccgtcattcccgcgcaggcgggaatctagaccttagaacaacagcaatattcaaagattatctgaaagtctgagattctagattcccactttcgtgggaatgacgggatgtaggttcgtgggaatgacgtggtgcaggttcgtgggaatgacgtggtgcaggttcgtaggaatgacgtggtgcaggtttccgtgcggatggattcgtcattcccgcgcaggcgggaatctagaccttagaacaacagcaatattcaaaggttatctgaaagtccgagattctggattcccactttcgtgggaatggcgcgattagagtttcaaaatttattctaaatagctgaaactcaacgcactggattcccgcctgcgcgggaatgacgaagtggaagttacccgaaacttaaaacaagtgaaaccgaacgaaccggattcccactttcgtgggaatgacgggatgcaggtttccgtacggatggattcgtcattcccgcgcaggcgggaatctagacattcaatgctaaggcaatttatcgggaatgactgaaactcaaaaaactggattcccactttcgtgggaatgacgggattagagtttcaaaatttattctaaatagctgaagctcaacgcactggattcccgcctgcgcgggaatgacgaagtggaagttacccgaaacttaaaacaagcgaaaccgaacgaactggattcccattgtcgtggaaatgacgggattttaggtttctgtttttggttttctgttttcgtgggaatgacgggatgtaggttcgtgggaatgacggttcagttgctacgcatttaccctgcgcaaagctttatccactatcttgtaacctgtctgacaatctgtcctctcttacaaaatgccgaaactttttcaggctgcattttggggctgcctgtgcggaatttggcggtaggcgcggtagtagggttcgagctgtcgggcgatgagttggagctgttggaggaggatgtggctttgtgttccgctgctgtgggtgcggagggtgtcgagttcgccgcgcagtgtatccagtgctgtctgaaagtcgtcgggttcggtttcgggcaggtgttggaagatgtgggcggtgtgttcggcggcgaggtggaactgtgcggtaaagtcggggctgcattcttcgtgcatttcgctgcggtatgcgccgagggcggagatgtagccggtcagggcgtagccggttttgagcagggtaaagccgggttgcaggctgtcggcgaattttgcgggttcgctgctcatgtcggaaagggtgctgctgagggcggcggtgtgttcgtgggcgcggcggcgggtggcgcggtattcgacgtcgtcgccggtttcgccgcttttgaggcgttcggtgattttttcgagataggcaccgttgctgcatacggcaagggcggcggtgcgttcgagcgtgaggtatttccagtctggccacaggtagctgactgccgcccaggcaagggatgcgccgataatggtgtcgatgatgcgtacgggcatggcggcgtatacgtccaaacctgcgagggagaggctggtcagggcttgaatggtaatgaagaaggtggagaaactgtatttgtaggtgcgggtcatgaaaaagagggtggtactggcgatgacaatccagagtttggtttcgacagacggggtgaagtaggggacgagcgagccgacgattacgccgagtacggtgccggcgatgcgctggcggacgcggcttttggtggcggtgtagttgggttggcagacgaaaagggcggtcagtagtatccagtagccgaggttgaggttgagggcttcgacgatggtgcaggcggcggcaacgacgagggacaggcggacggcatggcggaatacgcctgattcgaggtttagctgcggacggattgcctgccaggtgtttttgaggctgctggtttcgagggcggcgatgcgggtgtcgcccatgcggtcgttttctgcctgcaggccgttgtgctggagttggcggaactgctggtcgacgctgccgaggttgtcgagaaggcggcgcaggtggcggatgtcgggactgtcgttgctgtctgaaaggaggcgcagcgattggcggcagccttcgatggcgcggccgaggcgtttgctgtaaacgtagtctttgcttgcgcgcagggcttgggcggtgttgcggcaggcttgtccctgcatttcgagcaggcggtggatgcggaagatgatgtcggtgtttttgaatttttcggacatttcctgataatcgacgtgggcggagctgatgcgttcgtgtatgtcttgggcggcaaagtagtaacgcagcattttggcggtgcgcgggtggcggtgtttgccgcgaaggcggtaaaacagggcggaacggcattggttgaaggcggtgatgacgccggtgttgctcatggcgaggtcgatgtggcggttgcctatccaggctgcctcatcggggtcgaagaagtcggctttggcttcgaggtagccgccgagtgcgtcgtaggcgttggcgacgctttcttggacggggcggtggggcaggacgatttggaacaggaggatggcggtgctgtacagtacggtgccgcataaaatcatgaaggggttggtcagccagtaggtttcgggggtgtaggtaagtgtggtgtaggtggcgacggcgagtgcaccgaaggcgaaggtgcggtatttgagcccgaccgcgcctaaaatggtgaagccgaaggtcatcagggtcatggcgaggatgaagggcagccctgtgccgagggtgctttgtgccgtgagcgaggagagggtgaacagggcgacggtggtgatgatgtttttcagccgtccggtcaggcggttgtccaaatcgacaaggccgccggcgatgatgccgagtacgaagggcatggcgagcttgggttcgcctagctgccagacgatggaggcggcggtaaaaacactggcgaaaacgggaagcgaggtaatgagcagaggcttgaggagtggggttttcatggttttaccggtttattgttatgaagtgaatatagtggattaacaaaaaccagtacggcgttgcctcgccttagctgaaagagaacgattctctaaggtgctcaagcaccaagtgaatcggttccgtactatttgtgctgtctgcggcttcgtcgccttgtcctgatttttgttaatccactataaatttaatccactataaagtgtagcacatgaatggggcggataaaatcatgccgtctgaaaacggggatgcggttttcagacggcattgggttttgcggatcaggaaatgaggttgagaccgttgaccctgtcgtaaaggagttcgggcgttttgccttctttgtgcagttggatgtgcaatcgcaggttgttggcggaaacggactggcgcagggcttcttcgtaactgatgatgccgtgacggtacagttcgaaaaggttttgatccatcgtctgcattccgtcggttttggcggtttccatgattttactgatgttcatcaggtcgcccttcaggatgaagtcttggatggcgggcgtgttgatgagcaagtcgacaaccgccgtcctgcccgttttgtcttgtttgagggcgaggcgttggcagatgatgccggtcaggttgagggcgatgtcgatcagtatttggttgtgctgttctttggggtagaagttgagtatgcgttcgagcgactgcggcgcggtgttggcgtggagcgtaaaaatgcacaggtggccggtttgggcgagctgcatcgcgtattccatactttccctgctgcggacttcgccgatgcagaccacgtcgggggattggcgcatagcgttttgtaccgccgtctgccagtttatggtgtcgacgccgatttcgcgctgggtaaagatgcagcggcgcggtttgtagataaattcaatcgggtcttcgatggtaacgatatggctgggcagggttttgttgcggtgttcgagcatagtcgccatcgtggtggatttgcccgaaccggtaggcccgacgataatcagcagcccgcgcggtgcgacggcgaggtctttgagtttttcgggcaggcccaattcctgcatttgcgggatgacgtggttgatgcgccgcaaaaccaaacctgcgctgccttggctgtggtaggcgttggcgcggtagcgcgtgccgctgcgcgactggacggagtagttgatttcgccgtcgcgccggaatatttccgattgttcggcgttcatcgtcgatgcggcgatggcggcggtttcctcgcccgtcagcgccttttgcggctgcggggttaatgcgctgttgattttcaacgagggcgggaatcctttgctgataaggatgtcggacgcgttttgtgcttctgcggtttcgcacaggcggtcgagcagcgggtggaagtgtgcgccgatttcggccggggtttcggatcggctttgttttttttgagaatacacttgaaccatttcgtccaagatgtcgtgcaggttatcggtattcatcgttagcttcttttcggtttaagccttgcagtttgcggcggcaggtttcaacaggaaggcggacgcttcttgttcggaaaggtagccgggcgggatgctgcgtcccgccccgcgtgtttgcgccttgttttcccgccggtatggccggaaagcggttgtgtgtcagaaactcatactttcgctgttttgcgcgcgtctgcgtgcgacttccggtgcgatcagcccttggcgcaccagcgattgcagcgattggtccattgtctgcataccgctcgcctgcccggtttgcaggacggagttaatctgcgtgattttgttttcgcggatgaggttgcggacggcggggttggcaatcaggatttcgtgcgaggcgacacggccgttgccgtcgtgcgttttcagcaggttttgggagatgacggcggtcagcgattcggacagcatagagcgcaccatttctttttctcccgccgggaatacgtccacaatacggtcgacggtttttgctgcgccggtcgtgtgcagcgtgccgaaaaccaagtgtccggtttcggcggcggtcagtgccaagccgatggtttctgggtcgcgcatctcgccgacaaggataacgtcggggtcttcgcgcaatgcggaacgcagcgcgttggcgaagctgagggtgtgctggtgcagctcgcgctggttaatcagggattttttgctttggtggacgaattcaatcgggtcttcgatggtcaggatgtgtgccggctgggtttcgttgatgtagttgatcatcgcggcaagcgtggtcgatttgcccgaaccggtagggccggtaaccaaaaccatgccgcgcggcgattctgcgattttttggaaaatgctcggggctttcaattcttccagcgataagacggtgctgggaatggtgcggaatacggcggcgggaccgcggccgatgttgaaggcgttgacgcggaatcgggcgacgttgggcagttcgaacgagaagtcgacttccaagttttgctggtagattttccgctggtggtcgttcatcaccgaagttaccatattaccgacctcttccgcgctcatttcgggaaggttgatgcgccgcatatcgccgtgaacccgaatcataggggatatgcccgaactcaggtgaaggtcggatgctttgtttttagcgccgaaggcgagtaagtcggtaatctgcataatgcggctctgtttagtataatgtttcgattggttggaatggttctaacaaccttgattgtaccgccctgactggaggggtttcaactgtttaatcatttttaattaggggataatctatgacggtgttgcaagaacgttattgtgaggtgtccgaccgtatcggaaaattggttctgcaggcgggcagggagccgcattccgtcagcctgattgccgtcggtaagactttcccttcagacggcatccgcgaagtttacgccgccggacagcgtgatttcggcgagaactatattcaggagtggtacggcaaaacggaagagttggcggatttgaccgacatcgtgtggcacgtcatcggcgatgtgcagtccaacaaaaccaagtttgtcgccgaacgcgcgcattgggtgcataccgtatgccgtctgaaaaccgccgtccggctgagcgggcaacgtccttcctcaatgccgcctttgcaggtgtgtatcgaggtgaacattgcgggcgaggcggtgaagcacggtgtcgcgcccgaagaagcagtcgcgcttgctgtggaagtggcgaagctgccgaatatcgtcgtacgtggactgatgtgtgttgccaaagccaacagcagtgaaacggagttgaaggtgcaatttcaaacgatgcggaaactgcttgccgacctcaatgcggctggcgttaaggcagacgtgctgtctatggggatgtcggacgatatgcctgccgccattgagtgcggtgcgacacacgtccgtatcggcagcgcgattttcgggaaaaggggctgatggaaattcgggcaataaaatatacggcaatggctgcgttgcttgcatttacggttgcaggctgccggctggcggggtggtatgagtgttcgtccctcaccggctggtgtaagccgagaaaaccggctgccatcgatttttgggatattggcggcgagagtccgccgtctttaggggactacgagataccgctttcagacggcaatcgttccgtcagggcaaacgaatatgaatccgcacaacaatcttacttttacaggaaaatagggaagtttgaagcctgcgggctggattggcgtacgcgtgacggcaaacctttgattgagacgttcaaacagggaggatttgactgcttggaaaagcaggggttgcggcgcaacggtctgtccgagcgcgtccgatggtaaaaaattgggaatgaatttagtaaggtaattttgaatagggtagaaataatgaatgtttattttctcggcggcggcaatatggcggctgccgttgcgggcggattggtcaaacaaggcggttaccgcatctatatagccaatcggggtgcggaaaaacgcgaacgtttggaaaaagagttgggggtcgaaacttcggcaaccctgccggagcttcattccgacgatgttttaatccttgccgtcaaaccgcaggatatggaagctgcgtgcaaaaatatccgcaccaacggcgcattggtgctttctgtcgcagccggattgtcggtcggtacgctcagccgttacctcgggggaacacgccgcattgtccgggttatgccgaatacacccggaaaaatcgggctgggcgtatctggtatgtatgccgaagcggaagtatcggaaacagaccgcaggattgccgatcgaatcatgaaatcagtcggtttgactgtttggttggatgatgaggaaaaaatgcacggcattaccggcatcagcggcagcggaccggcttatgtgttttatctgctggacgcattgcaaaatgccgccatccgacaagggtttgatatggcagaagcacgcgcgctcagtctggcaacgtttaaaggagcggttgcccttgccgagcagacgggtgaagatttcgagaagcttcaaaaaaatgtaacgtcaaaaggcgggacaacccacgaagccgtggaagctttcaggcggcatcgtgtcgccgaagccataagcgagggcgtttgtgcctgtgtgcgccgttcgcaggaaatggaacggcaatatcaataatgtaaagaaaataaaaaaaccaatccaaaacgtgttatgatgcgcgttttcaaaaacgccttaggcaataagccttataaaaatcaaaggaataaagccactttgtggtgctttgttttttgcggtgaaccgagaggatatacattatggcaaagctgacagaacaagatattttgaattggagcgggccggaagacgattatatgaatgacgaccatttggcttttttccgcgaattgctggtaaaaatgcaagacgaactcatcgaaaatgcttccgctacgacagggcatctccaagaacacgaatcagcccccgatcctgccgaccgtgccacacaggaagaagagtacgcattggaactccgtacccgcgatcgggaacgaaaacttctcagtaaaatacaggcgaccatccgcaatattgatgaaggggattatggattctgtgccgatacgggagagcctatcggtttgaagcggctgctggcacgcccgacagccactttatctgttgagtcccaagaacgccgagagaggatgaaaaaacagtttgccgactgatggcggcaaacaaaatgccgtctgagtccccgagtttcagacagcatattcacaaaggcgcaccagccggaggagggagaggaaaggattgttggaggcggcgcagtatttagcagaaataaaaaaccttatccgacagcgacatgacgaatttccccaaaaaaatcccgctgaaagcattgaccgtttttccctgtgggcgtatagttcggttcttcgctgctgcagaagtggcggacgaactgaaaagtatagcacagaatgttggggatatcgagagatatcttgacaggcggaaggaatactttataattcgcaacgctctttaacaaaacagattaccgataagtgtgagtgccttgagtctcacactgtttgaaagacagacaagataatgttttgaacattgtcctgttggtttctttgaagcagaccagaagttaaaaagttagagattgaacataagagtttgatcctggctcagattgaacgctggcggcatgctttacacatgcaagtcggacggcagcacagagaagcttgcttctcgggtggcgagtggcgaacgggtgagtaacatatcggaacgtaccgagtagtgggggataactgatcgaaagatcagctaataccgcatacgtcttgagagagaaagcaggggaccttcgggccttgcgctattcgagcggccgatatctgattagctagttggtggggtaaaggcctaccaaggcgacgatcagtagcgggtctgagaggatgatccgccacactgggactgagacacggcccagactcctacgggaggcagcagtggggaattttggacaatgggcgcaagcctgatccagccatgccgcgtgtctgaagaaggccttcgggttgtaaaggacttttgtcagggaagaaaaggctgttgctaatatcagcggctgatgacggtacctgaagaataagcaccggctaactacgtgccagcagccgcggtaatacgtagggtgcgagcgttaatcggaattactgggcgtaaagcgggcgcagacggttacttaagcaggatgtgaaatccccgggctcaacccgggaactgcgttctgaactgggtgactcgagtgtgtcagagggaggtagaattccacgtgtagcagtgaaatgcgtagagatgtggaggaataccgatggcgaaggcagcctcctgggacaacactgacgttcatgcccgaaagcgtgggtagcaaacaggattagataccctggtagtccacgccctaaacgatgtcaattagctgttgggcaacctgattgcttggtagcgtagctaacgcgtgaaattgaccgcctggggagtacggtcgcaagattaaaactcaaaggaattgacggggacccgcacaagcggtggatgatgtggattaattcgatgcaacgcgaagaaccttacctggtcttgacatgtacggaatcctccggagacggaggagtgccttcgggagccgtaacacaggtgctgcatggctgtcgtcagctcgtgtcgtgagatgttgggttaagtcccgcaacgagcgcaacccttgtcattagttgccatcattcagttgggcactctaatgagactgccggtgacaagccggaggaaggtggggatgacgtcaagtcctcatggcccttatgaccagggcttcacacgtcatacaatggtcggtacagagggtagccaagccgcgaggcggagccaatctcacaaaaccgatcgtagtccggattgcactctgcaactcgagtgcatgaagtcggaatcgctagtaatcgcaggtcagcatactgcggtgaatacgttcccgggtcttgtacacaccgcccgtcacaccatgggagtgggggataccagaagtaggtaggataaccacaaggagtccgcttaccacggtatgcttcatgactggggtgaagtcgtaacaaggtagccgtaggggaacctgcggctggatcacctcctttctagagaaagaagaggctttaggcattcacacttatcggtaaactgaaaaagatgcggaagaagcttgagtgaaggcaagattcgcttaagaagagaatccgggtttgtagctcagctggttagagcacacgcttgataagcgtggggtcggaggttcaagtcctcccagacccaccaagaacgggggcatagctcagttggtagagcacctgctttgcaagcagggggtcatcggttcgatcccgtttgcctccaccaatactgtacaaatcaaaacggaagaatggaacagaatccattcagggcgacgtcacacttgaccaagaacaaaatgctgatataataatcagctcgttttgatttgcacagtagatagcaatatcgaacgcatcgatctttaacaaattggaaagccgaaatcaacaaacaaagacaaagcgtttgttttgattttttattctttgcaaaggataaaaatctctcgcaagagaaaagaaaacaaacacagtatttgggtgatgattgtatcgacttaatcctgaaacacaaaaggcaggattaagacacaacaaagcagtaagctttatcaaagtaggaaattcaagtctgatgttctagtcaacggaatgttaggcaaagtcaaagaagttcttgaaatgatagagtcaagtgaataagtgcatcaggtggatgccttggcgatgataggcgacgaaggacgtgtaagcctgcgaaaagcgcgggggagctggcaataaagcaatgatcccgcgatgtccgaatggggaaacccactgcattctgtgcagtatcctaagttgaatacatagacttagagaagcgaacccggagaactgaaccatctaagtacccggaggaaaagaaatcaaccgagattccgcaagtagtggcgagcgaacgcggaggagcctgtacgtaataactgtcgagatagaagaacaagctgggaagcttgaccatagtgggtgacagtcccgtattcgaaatctcaacagcggtactaagcgtacgaaaagtagggcggggcacgtgaaatcctgtctgaatatggggggaccatcctccaaggctaaatactcatcatcgaccgatagtgaaccagtaccgtgagggaaaggcgaaaagaaccccgggaggggagtgaaacagaacctgaaacctgatgcatacaaacagtgggagcgccctagtggtgtgactgcgtaccttttgtataatgggtcaacgacttacattcagtagcgagcttaaccgaataggggaggcgtagggaaaccgagtcttaatagggcgatgagttgctgggtgtagacccgaaaccgagtgatctatccatggccaggttgaaggtgccgtaacaggtactggaggaccgaacccacgcatgttgcaaaatgcggggatgagctgtggataggggtgaaaggctaaacaaactcggagatagctggttctccccgaaaactatttaggtagtgcctcgagcaagacactgatgggggtaaagcactgttatggctagggggttattgcaacttaccaacccatggcaaactaagaataccatcaagtggttcctcgggagacagacagcgggtgctaacgtccgttgtcaagagggaaacaacccagaccgccagctaaggtcccaaatgatagattaagtggtaaacgaagtgggaaggcccagacagccaggatgttggcttagaagcagccatcatttaaagaaagcgtaatagctcactggtcgagtcgtcctgcgcggaagatgtaacggggctcaaatctataaccgaagctgcggatgccggtttaccggcatggtaggggagcgttctgtaggctgatgaaggtgcattgtaaagtgtgctggaggtatcagaagtgcgaatgttgacatgagtagcgataaagcgggtgaaaagcccgctcgccgaaagcccaaggtttcctgcgcaacgttcatcggcgtagggtgagtcggcccctaaggcgaggcagaaatgcgtagtcgatgggaaacaggttaatattcctgtacttgattcaaatgcgatgtggggacggagaaggttaggttggcaagctgttggaatagcttgtttaagccggtaggtggaagacttaggcaaatccgggtcttcttaacaccgagaagtgacgacgagtgtctacggacacgaagcaaccgataccacgcttccaggaaaagccactaagcttcagtttgaatcgaaccgtaccgcaaaccgacacaggtgggcaggatgagaattctaaggcgcttgagagaactcaggagaaggaactcggcaaattgataccgtaacttcgggagaaggtatgccctctaaggttaaggacttgctccgtaagccccggagggtcgcagagaataggtggctgcgactgtttattaaaaacacagcactctgctaacacgaaagtggacgtatagggtgtgacgcctgcccggtgctggaaggttaattgaagatgtgagagcatcggatcgaagccccagtaaacggcggccgtaactataacggtcctaaggtagcgaaattccttgtcgggtaagttccgacccgcacgaatggcgtaacgatggccacactgtctcctcctgagactcagcgaagttgaagtggttgtgaagatgcaatctacccgctgctagacggaaagaccccgtgaacctttactgtagctttgcattggactttgaagtcacttgtgtaggataggtgggaggcttagaagcagagacgccagtctctgtggagccgtccttgaaataccaccctggtgtctttgaggttctaacccagacccgtcatccgggtcggggaccgtgcatggtaggcagtttgactggggcggtctcctcccaaagcgtaacggaggagttcgaaggttacctaggtccggtcggaaatcggactgatagtgcaatggcaaaaggtagcttaactgcgagaccgacaagtcgagcaggtgcgaaagcaggacatagtgatccggtggttctgtatggaagggccatcgctcaacggataaaaggtactccggggataacaggctgattccgcccaagagttcatatcgacggcggagtttggcacctcgatgtcggctcatcacatcctggggctgtagtcggtcccaagggtatggctgttcgccatttaaagtggtacgtgagctgggtttaaaacgtcgtgagacagtttggtccctatctgcagtgggcgttggaagtttgacgggggctgctcctagtacgagaggaccggagtggacgaacctctggtgtaccggttgtaacgccagttgcatagccgggtagctaagttcggaagagataagcgctgaaagcatctaagcgcgaaactcgcctgaagatgagacttcccttgcggtttaaccgcactaaagagtcgttcgagaccaggacgttgataggtggggtgtggaagcgcggtaacgcgtgaagctaacccatactaattgctcgtgaggcttgactctatcatttgaagaacttcaagagataaaagcttactgactgattcagtcattaccgaatatattgattaaggctttaccgatttgtaacagtttaagtttggcggccatagcgagttggtcccacgccttcccatcccgaacaggaccgtgaaacgactcagcgccgatgatagtgtggttcttccatgcgaaagtaggtcactgccaaacacccattcagaaaacccccgattattcgggggtttttgctttgcccggaaaaaatgtttgctttgcccggaaaaaatgtcggtgatggcgggacggcatccgtacggtgtccggtcgggtttgcggaggaacggcttgaaactttgggatattcattttagaatgactcgttttatcgtcgcaagatgcggtttattgtttgcaacccttaaaggaaaaaccatgaagaaaatgttcgtgctgttctgtatgctgttctcctgcgccttctcccttgcggcggtaaacatcaatgcggcttcgcagcaggagttggaggcgctgccaggcataggccctgcggtgctggcgaagctgaaggatcaggcttccgtcggcgcgcccgcaccaaaaggcccagccaaaccagtgctgcccgcggataaaaaataaaatagggggaagtctgcagccgcatcaaatgccgtctgaacatgcgttcgggcggcgtttttataacaaaaacacttcatggcggttggttttatgcctatctaagtttttgtgtcgtgcatacctgaagatttcagacggcatcggtttatgctgtctgaaaagtgtattccgtttcagtttgtaagctatggcagtctgtttgtcttgtgttttgcgcaattgcccttattttgagccgtgattttattttgaattagatgaaaaaatgagtaatcaagatttttatgcgacgctgggtgtggcaagaacagctaccgatgatgagattaaaaaagcctaccggaaattggcgatgaaataccatcccgaccgcaatcctgacaataaagaggcggaagagaagtttaaagaagtacaaaaggcgtatgaaactttgtccgacaaggaaaagcgcgctatgtacgaccagtatggtcatgcggcgtttgaaggcggcggacaggggggcttcggagggtttggcggatttggcggtgcgcagggttttgactttggggatattttcagccaaatgtttggaggcggttcggggcgcgcccagcctgattatcagggtgaggacgttcaagtcggtatcgaaatcacgcttgaagaagccgcaaaaggtgtgaagaaacgcatcaatattccgacttatgaagcgtgtgatgtctgtaacggcagtggcgcgaaaccggggacatccccggaaacctgcccgacttgcaaaggttcgggtacggtgcacatccagcaggcgattttccgtatgcagcagacttgtccgacctgccacggtgcgggcaaacacattaaagaaccttgcgtcaaatgccgtggcgcggggcggaataaggcggtcaagacggtggaagtcaatattcccgccggtatcgatgacgggcagcgtatccgtttgagcggcgaaggcgggccgggtatgcacggtgcgcctgccggcgacttgtatgtaaccgtccgcattcgggcgcataagattttccaacgcgacggtctggacttgcattgcgaactgccgatcagttttgccacggctgctttgggcggggagttggaagtgccgaccttggacggaaaggtcaagctcaccgtccccaaagaaacccaaaccggcaggaggatgcgcgtgaagggtaagggtgtcaaatctttacgcagcagcgcgaccggcgatttgtactgccatattgttgtcgaaacgcctgtcaatttgaccgaccgtcaaaaagagcttttggaagaatttgagcggatttctaccggcttggaaaaccaaacaccgcgcaagaaatcgtttttagacaagctgcgcgatttgtttgattgattttaaggttcggaaacaagcagccgtatcggggaatctccttgatacggctgtttttatttgtttaaaaatagtttttattttcaatggggtatgaggcagggtgggataactgtttttaactgttctttttaaaacttgacatcatggcgtgatgccaacaatatgtgaacgtctgttgtcaaaggaagaataatgaataaatctttatccagttcggtagaagaataccgcgagctgacgctccgaggcatgatactcggtgcattgatcactgtaatttttactgcgtccaatgtttacctcggtttgaaagtcgggctgacctttgcctcgtcgattccggcggcggtgatttcgatggcggttttaaagtttttcaaaggcagcaatattttggaaaacaacatggtgcagacccaagcctcggctgcgggtacgctttcgaccatcatcttcgtcctgcccggtttgctgatggcgggctactggagcggtttcccgttctggcagacgacgcttttatgtattgccggcgggattttgggggtgattttcaccattcctctgcgttacgcaatggtggtgaaaagcgatttgccttatccggaaggtgtggcggctgctgaaattttgaaagtgggcggtcatgaagaaggggataaccgtcagggcggcagcggcatcaaagagctggcggccggcggtgcgttggcgggattgatgagcttttgcgccggaggtctgcgcgtgattgccgacagcgcgagttattggtttaaaagcggtacggcgattttccagctgccgatgggcttttcactggcattgttgggcgcgggctatttggtcggactgacgggcggtatcgccatcctgttgggcatttcgattgcttggggcattgccgtgccgtatttctcctcacacattccgcaaccttccgatatggaaatggcggcgtttgcgatgaagctgtggaaggagaaagtgcgttttatcggtgcggggactattggcattgcggcggtttggacgctgttgatgctgctcaagccgatggtggaaggcatgaagatgtcgttcaagagttttggcggcggtgcgcccgctgcggaacgcgccgaacaggatttgtcgcctaaggctatgattttttgggtgctggcgatgatgtttgttttaggcgtgtcgttttaccactttatcggcgattcgcacattacgggcggcatggcttggcttttggtggtcgtttgcacgcttttggcttccgtcatcggctttttggtcgccgccgcctgcggttatatggcaggtttggtcggctcgtcttccagcccgatttccggcgtgggcatcgtgtccgtcgtcgttatttcactggttttgctgctggtaggcgaatccggaggtttgttggcggatgaggctaaccgcaaatttttgctggcactgactttgttttgcggctcggcagtaatctgcgtggcttcgatttccaatgacaacctgcaagacttgaaaaccggctacctgctcaaagccacgccttggcggcagcaagtcgccctgattatcggctgtatcgttggtgcgctggttatttcgcccgtgttggaactgctttacgaagcctacggctttaccggcgcaatgccgcgcgaaggcatggacgcggcgcaggctttggcagcccctcaagcgactttgatgacgaccatcgcgtcgggcattttcgcccacaaccttgaatgggtctatatctttaccggtatcgtgattggagcagtattaatcgtcgtcgatttggtgttgaaaaaatcatcaggcggcaaacttgccctgcccgtccttgcggtcggtatgggtatttatctgccgccgtccgtcaatatgcccatcgtggcaggcgcggtgttggcggcggtgttgaaacacatcatcggtaaaaaagcggaaaaccgcgaaggccgtctgaaaaacgccgagcgcatcggaaccttgttctccgccggcctgattgtcggtgaaagcctgatcggtgtgattatggcgtttattattgccttctccgtgaccaacggcggctcggatgcgccgctcgcgttgaatctgcaaaactgggatgccgccgcttcttggctgggtttggcgttcttcgttaccgggatgtttttctttgcacagcgcgtactgaaggcgggcaagtaggctgtcggaaaaaatgccgtctgaaacgttcagacggcattttttatcggtaaagcggaaggcggagcttttcggcttgcgcccacgttttgccggcaaggtctttgggcgacagcagcggcgcggtttgaagcggccagcctatgccgactgtcgggtcgttccatattaaaacctgttcggcttcaggcttgtaatagtccgtgcatttatagacgaactcggcttcatcgctcagtacatagaagccgtgtgcgaaaccttcgggtacccacagttggcgtttgttttctgcggacagaatttcgcctacccatttgccgaaagtgggggagtctttacgcatatcgacggccacgtcgaatacttcgccgacaaccacgcgtacgagtttgccttgtgtgttttcagtttgatagtgcaggccgcgcaatacgcctttgccggatttggagtggttttcctgcacgaaggtgcgttcgcagacttgggttttaaaccactcgtcgcggaaggtttccataaaaaagccgcgcgcgtcgccgaagacttggggctcaagcagttttacgtcaggaatggcggtatcaatgatgttcatctttttatctttcatctaaaggccgtctgaaaagtttcagacggcctcaaacattattttttcaacaggcgcagcaaatattggccgtattggtttttcgccatcgggcgcgccaattcttccagtttttcatcggaaagccaaccgttgcgccaagcgatttcttcgaggcaggcgatgtgcaggttttggatattttgcacggtttggacgaatgaagcggcttcgtgcaggctctcgtgggtgccggtgtccagccacgcgaaaccgcgtcccaatatttgaacggagagcgagccgtcttccaaatacatccggttgaggtcggtaatttccaattcgccgcgtgcggacggtttgagctgtttggcgaactcgacggcgcggttgtcgtagaaatacaagccggttaccgcccaatcggatttgggccgttgcggtttttcttcgatggaaacggcgcggaagttttcgttaaattcaaccacgccgaaacgttcggggtttttgacctgataagcaaacacggttgcgccgtgcgtttgcgctgccgcctgtttcaatgtttgcgtaaacgactgaccgtaaaaaatattgtcgcccaaaaccaagcaaacattgtcgttgccgataaattcttcgccgatgataaatgcctgtgccaagccgtccggactgggttgcacggcataactgatggaaatgccgaaatcgctgccgtcgccaagcaggcgtttgaaagaggcgttgtcttcaggcgcggtaatcaccaaaatatcgcggattcccgccagcatcaaaaccgacaaggggtaataaatcatcggtttgtcgtacacgggcaggagctgtttggatacgccgcgcgtgatggggtagaggcgcgtgccgctgccgcctgccagtatgatgcctttcatcttttctttcttcctttgcgatgggttttcagacggcattgcgtcgggatgccgtctgaaaactattttccagtacctaaacgttccaaacgatagctgccgttcaatacattttgccaccaggttttgttgtccagataccattgcacggttttgcggaggccggactcgaaggtttccaaaggcagccagcccaaatcccgcctgattttggctgcgtcgacggcgtagcgtacgtcatggccggggcggtcttgtacgaaagtaatcaaatcttcataacgcgccacaccggccggtttttcgggagcgagttcttccagcagggcgcagatggttttgacgacttcaatattggctttttcattgtggccgccgatattgtaggtttcgccgacaacaccttcggtaacaacctgatacagtgcgcgcgcgtggtcttcgacaaacagccagtcgcggatttgcataccgtcgccgtacacaggcagcggtttgccgtcaagcgcgttcagaatcatcaaaggaatgagtttttccggaaaatggtaaggaccgtagttgttggagcagttggttacaatggtcggcaagccgtaagtacgcaaccacgcgcggacgaggtggtcgctggacgctttagaggcagagtaggggctggacggcgcgtagggcgcggtttcggtaaacaaatcgtccgtgccgcctaaatcgccatagacttcatcggtggaaatatggtggaaacggaaggcttcgtgctgttcagacggcatttgttgccagtaggcgcgggctgcttcaagcagattgaatgtgccgacgatattggtttggataaactcgcctgccgaaccgatagagcggtcgacatggctttccgccgccaagtgcatcacggcatcaggccggtattgcgcgaatacgcggtcgagttcggcgcggtcgcaaatatccacttgttcaaaagcatagcgaggattatcggctacctcagtcaaagattccaaattgccggcataagtcagcttatcgacattgacgacagcgtcccgggtgtttcggataatatgacggacaacggcagaaccgataaagcccgcgccgccggtaacaaggatttttctcataaatttcagaggatagccaaaaaatataaacagattatagcagacagaatgtgtgtttttcagataaagaggccgtctgaaaacatctctttcagacggcctgtatcaggtcaacttaatcgtcgtagccattcggattattactcacccagcgccatgagtcttccatcatttgggttaaatcacgctgggtttgccagccgatttgcgcctttgtataggaagggtcggcatagaagcacgccaaatcaccggcacggcgcggtttgacttcatacggaatcgtcaaacccgaagctgcttcaaatgcgcggatgatttccaacaccgaagaagcgcggccggagcctaagttcagcaaatgcgtgcctgctacattactttttgcctgcatagccgcgacatggccttctgccaaatccatcacatgaatatagtcacgcatccccgtgccgtcgggggtagggtagtcatcgccaaataccgccaattgcggcagtttgcctgccgccacttggcagatataaggcaacaaattattcgggatgccgtttggctgctcgccaatcaagccgctttcatgcgcgccaatcggattgaaataacgcaacaaaatcatgctccagcgcggatcggctttttgaatgtcagtgagaatgcgctcaaccatcgatttcgatgcgccgtaagggctggtggtgtcgcccggtggcatatcctcggtataaggcactttgcccggatcgccataaaccgtcgccgaagaactgaacacaatgctaaacacgcccgcacgcgccatttcttccgccaacaccaagctgccggaaacattattatcataatatttcatcggctcggccacactttcacccaccgctttcaagccggcaaaatgaatcaccgaatcaatgcggttttccgcaaaaatacggcgcaaaatctcacgatcgcggatatcgccttgataaaacggaatctcttggccggtaatcgttttcaagcgtggcaggatattgatgctggaattgcataggttatccaaaatcacgacttgatggccgcttttcagcaaagaaacaacggtatgcgagccgataaaaccggtgccgccggtaacgagaatttttttcatagaataaaatactaaaaatactttgatagattgataataatggttgtaaaatcttaatgaaataattatccctgaagtagcagtagatttcttcagatttttttggttaagtatatttgatatctaaggtaaaatactataattttattcatatggtgtagaattaagggaaaatagtgaaaaaagtattactaattgccagttatgactcgttccttaactcgggctatgctgttgcaaaagagataaaagatgctcaaattgatatttatatccacaaaagtcgagaaaacattctttcaaatcgacagttattagaatcagggatagataaagaccaagcaattttttttttcatattgatgattactttattaagaatatgcatcaatattatgacgcagtaattttatcggttggaaatgggttgttaaaaaggttctttaagcagaatgcgcaattaaatattgcttcaaggccattgattattaccttgtttccaggtgtagtattcggtgatcaggcaagtattctatctcgtatgggggctgatattgttttatataataataagcatgattttagaattgcagaggaatataagaaacaatataaattaagttgtcaaaatatactttatggttatccaatttttcgccatgcttcgaaaggttgtcatggagagaaaatttactttattgaccaagttaaaatcccatttaaaaaagaagaaagaatttatacattaaaaaaattgattgccttggctgaaaaataccctgagaaagaatttactattttgctaagggttgcagataaagatattactgtgcatcaggataaacattcgtatatagagctggcaaagcagtttcagttgccgagtaatttgacaatagagcgaaaaagtaccgcgcaagccttccaagaaatggggtattgtttatcttattcatctactatgctttttgaagctgaatgtaagggtatccctgttggtgttgttgcagacttaggcttttctaaatcctatgcaaatcagcattttttaggtagtggggttttagtttattttgatcaaatagatttcacttccccaaaaatagcagatccggattggcttgattgctatgctactaaaaaggtgattacaactgatgagtttaataagctattaaagcaggttgtgccattgcaacatgattaccaagaatatttatctgcaggaattcgatatcaagctttggctaacacacacgccattccaaccaatagttttctcggcataaagccatgctctgacgcttaaatgcactaatgccttaaaaaaacattaaagtctaacacactagacttatttacttcgtaattaagtcgttaaaccgtgtgctctacgaccaaaagtataaaacctttaagaactttcttttttcttgtaaaaaaagaaactagataaatctctcatatcttttattcaataatcgcatcagattgcagtataaatttaacgatcactcatcatgttcatatttatcagagctcgtgctataattatactaattttataaggaggaaaaaataaagagggttataatgaacgagaaaaatataaaacacagtcaaaactttattacttcaaaacataatatagataaaataatgacaaatataagattaaatgaacatgataatatctttgaaatcggctcaggaaaagggcattttacccttgaattagtacagaggtgtaatttcgtaactgccattgaaatagaccataaattatgcaaaactacagaaaataaacttgttgatcacgataatttccaagttttaaacaaggatatattgcagtttaaatttcctaaaaaccaatcctataaaatatttggtaatataccttataacataagtacggatataatacgcaaaattgtttttgatagtatagctgatgagatttatttaatcgtggaatacgggtttgctaaaagattattaaatacaaaacgctcattggcattatttttaatggcagaagttgatatttctatattaagtatggttccaagagaatattttcatcctaaacctaaagtgaatagctcacttatcagattaaatagaaaaaaatcaagaatatcacacaaagataaacagaagtataattatttcgttatgaaatgggttaacaaagaatacaagaaaatatttacaaaaaatcaatttaacaattccttaaaacatgcaggaattgacgatttaaacaatattagctttgaacaattcttatctcttttcaatagctataaattatttaataagtaagttaagggatgcataaactgcatcccttaacttgtttttcgtgtacctattttttgtgaatcgataccgtcgacctcgagggggggcccggtacccaattcgccctatagtgagtcgtattacgcgcgctcactggccgtcgttttacaacgtcgtgactgggaaaaccctggcgttacccaacttaatcgccttgcagcacatccccctttcgccaggcaaaaaaccggttatatttttttgcattaaatatttttttagcatattcaggaaaggggacatgcaatatgtcaaaatgatctatatatcctttaatattaagattatttccaatcaaataacgttctaattttgttggatgatatgaaaatgattctaataaaggagcatatgttccagtcccttcatcaattaaatgagtcgtaatattctttttttttgcaatactaatcagataggagtagtggcctgtaaaagacagcatatagagatgagcaggctgtataatattaaggatttttttgtaacttctataaatataaagtaattttttaggagttatattattagggcttctaggaagctcaaatagataaatagattcaaatagattcttgttagctgattgatgaactaacttaggcatttttaagtttttagaagtatataaaattactagtaaattattggttaatttttgtattttaattaggctttggacttggttaagctgacctaaattagatatgacaaataaattgttacgtgggggggtaagataaaatggagatgttgtcaaccacattgaatcttgaaaaaactttttaggctgaaaaagagctttttttattttctttagcattattgtatctcttaaaaattaatgagaattagctatatgtaatagccaatcctctgttaataaagtaactaagttaataagcattattcaatatcagtttttttgatttgagcacctttgcgaatattgcaagcagcgaccttaccaaataatgtttcatattcgttgacgctgaagtctccattgcctgggcgtttaacccataggttatctccggacaacagttctccttttttaatgtctttatctgctacgacagatgcaaaggcgaaatctttagttggcttttctcccgcgataatcgtgtcttttttgccgccgcgtgccaattttaaagcatgagcgccttgcttgagctctttaaaagtatccggattcatagagcatacaatatccggacctgggcgatccatgcggtcagtaaagtgacgctctaaaatcgaaccgcctaaagctactgctcctaagcaagcatagttatctaaggtatggtcagacaggccaatgattgcgtctggaaaggcttcagataaatcgttcataccacccaatcgaacatcttcgtaaggggttgggtagatgttggtacagtgaagcaaagcataaggtacccctgcttctcgaataatttctaccgactttttgatgctttcaatagaattcatgccggtagagagaataataggcttaccaaaagaggccaccagtttaattaatgggtagttattacattcgccagagccgattttatatgctggaatatccatacgttgtaatcgtaaagcagctgcacgagagaaaggagtactgataaaaatcatacccttactctctacgtattcttttaatttaatctcatcttcttcattcagggcgcaacgttccataatttcataaatagagacatctgcattgcctggaatgacttgtttggcctcatcagacatttcgtcttcaacgatgtgtgtttgatgtttaacaacttcagcgcctgcattataggcagcatcaaccatttcaaaagctgtttttaaagagccttcatgattgatgccgatttcacagataatcaatggttcgtggttgtaacctactgaacgattaccaattttaaattcgttgttgttttgcatttagctttccttgtgattaagaatgttttctgcctgttgtaaatcaagctcagtatcaatatcgatagagtcttgatgagacataatataaagtttggttggggcgataaaaaaacaattatttgcaattagtgaagcagtatcattaatgtaaattgcaccattaggcctaaatgcctgaggtaattgttggcgaggctgctccaaatcgcttagatggcgcatgggggcatattcgccattattgatttgaagcagggtttttagtggatgatgctccattgggcatgcagagacaacggatccttttattttctcatcaaatagagaaaaagcttcacgaatatgagcccctgtgcgtaatggactggttggttgtaatagggttactgtgccggaattactgccaattgtttctaaagcatgtattacacctgaaatagagctggctgtatcggaggccagctctgcagggcgtaggacgacttcgacaccgaaatttttagcttcttctgcaattaacccgccatcagtcgaaacaattatgcggtcaaaacactttgatgatatagcagcattaattgtatgaccaagtaatgatatgccattcattttccggagattttttaatggcaatcctttggagttttggcgcgcaagtataaccgcaatattttgtttttccataatttaaagattcaaatcgataaaacgtttttgagcagaaacattccacgtttcaggattgttgattacttcagcaaatctttctgtgctggtgcgagtatctccgccattaaaggtatcatctgcttcaaatttgcctaaactgcatgcttgttgaatcgcatcaaagatatttttagtttcataatctgtatgaataatagattttcccatatggcggttactttggcgtgtaccaacatcaattgaagggacaccgtagagaggagcttctctaatacctgcacttgagttgccgaccataaatttagcatgtttcaataagactaaaaaatattcaaatcgaatggaaggaaatgcaataaatttatcagattgatattttaataattcttgcagaatactttcagtgccagtgtcattattagggtagatgctaatgatattttggccacttaattctaatgctttgaaatattgggccgcatattgtggcattaaatgtgcttctgtagtcacggggtgaaacatagaaataccataattttcgtatggtaaaccgtaatattctttgacttcttctaaggatgggagggtggaagaggccataacatctaaatcgggggagccgatgatgtgaatatgctttcttttttctcccatttgcactaggcgagtgacagcttgttcatttgctaccaagtggatatgagaaagtttactaatagaatgacgaatggagtcatctactgtaccagatagttcaccaccttcgatatggcaaactaaacggctgcttaatgcacctacagctgcgcctgctagtgcttctaaacggtcgccgtgaatcatgaccatatcaggttcaatttcatcagatagacgagagataaacgtaatggtattgcctaaaacggcacccattggttcaccttggatttgatttgaaaacagatatgtatgttgatagttttctcgagttacttccttgtaggttctgccatatgttttcatcatatgcataccagttacaatcaaatgcaattcaaggtctgggtgattttcaatataggctaataaaggttttagcttgccgaagtcggctctggtacctgtaatgcaaagaattcttttcatgattttagaatctataagtatataagtataaggaagttggaaagaagaatactaattatactctacgtactcataaatttatttcgattaagtgctataattaggccatttataattatattaggatttggcttgtgtttaaagtgaaattttatattcgtcacgcagtattattattgtgtggaagtttaattgtaggatgctctgcgattccttcatcaggccccagcgcaaaaaaaattgtctctttagggcaacaatctgaagttcaaattcctgaagtggagctgattgatgtgaatcatacggttgctcagttattatataaggctcagataaatcagtcattcactcagtttggcgatggttatgcttcggctggtacgctaaatattggtgatgtattggatattatgatttgggaagcgccgccggcagtattgtttggtggtggcctttcttcgatgggctcgggtagtgcgcatcaaactaagttgccagagcagttggtcacggcacgtggtacggtttctgtgccgtttgttggcgatatttcggtggtcggtaaaacgcctggtcaggttcaggaaattattaaaggccgcctgaaaaaaatggccaatcagccacaagtgatggtgcgtttggtgcagaataatgcggcgaatgtgtcggtgattcgtgctgggaatagtgtgcgtatgccgctgacggcagccggtgagcgtgtgttggatgcggtggctgcggtaggtggttcaacggcaaatgtgcaggatacgaatgtgcagctgacacgtggcaatgtagtacgaactgttgccttggaagatttagttgcaaatccgcgacaaaatattttgctgcgtcgcggtgatgtggttaccatgattaccaatccctatacctttacgtctatgggtgcggtggggagaacacaagaaatcggtttttcagccagaggcttatcgctttctgaagccattggccgtatgggcggtttgcaagatcgccgttctgatgcgcgtggtgtgtttgtgttccgctatacgccattggtggaattgccggcagaacgtcaggataaatggattgctcaaggttatggcagtgaggcagagattccaacggtatatcgtgtgaatatggctgatgcgcattcgctattttctatgcagcgctttcctgtgaagaataaagatgtattgtatgtgtcgaatgcgccgttggctgaagtgcagaaatttttgtcgtttgtgttctcgccggttaccagtggcgcgaacagtattaataatttaactaattaatgtgagtaattaagatgtctgagcaacttcctgtggcagttgccactgaaaccaaagccgagcgtaaaaagccgaaaaagaaaagttggattaaaaagctaagccctttattttgggtaacggtgattatccctacggtaatttcgttggtgtatttcggcttcttcgcttccgatcgttttacgtcgcaatcgagctttgtggtgcgctcgcctaaaagccaatcttctctcaatggcctgggtgccattttgcagggcacaggttttgcccgtgcgcaagatgatatttacacggttggggagtatatgcgttcgcgctcgtctttggatgaactgcgtaaaatcttgccggtgcgtgagttttatgaaaccaaaggtgatgcgttcagccgctttaatgggtttgggttccgtggcgaggaagaggctttttatcaatactataaaaatcaggtgatgatcaattttgatacggtttcgggtatttccacgttgaatgtaacttcctttgatgcgctggaatctaagaaaatcaatgaggctttgttaaaacaaggtgaagcattgattaaccagttgaacgatcgtgcacgtgctgatacggtgcgctatgcggaagaagtagtgaaaacggcggcagagcgggtaaaggaagcctctcagaatctgacggattaccggattgccaatggcgtttttgatttgaaagcgcaatcggaagtgcaaatggggttggtttccaagctgcaagatgaattgattgtgattcaaacccagctggatcaggtgaaagcagtcactccggagaatccgcagattccgggtttgcaggcgcgtgagcagagcttgcgtaaagaaattgaccaacagttacgtgccatttcgggcggtgggcattcttcgttgtctaatcaggctgccgaatatcagcgtgtgtatttggaaaaccagttggcagagcagcagttggcagccgccatgacttctttggaaagtgccaaggttgaagcagaccgtcagcagctttatttggaagtgatctcgcaaccgagcctgccggatttggcacatgagcctaaacggttatacaacattgttgccactctgattatcggcttgatggtttatggtattttgagcctgttgactgccagcattcgtgagcataaaaactgatgaaagccttgcataaaacatcattttgggaatctttagccattcaaaggcgcgtaatcggtgcgctgttgatgcgggaaattatcacccgttacggtcgcaataatattggctttttatggctgtttgttgagccgttgctgatgacattcgttatcgtcttgatgtggaaatttttaagggcagaccgatattcaactttgaatattgtcgcatttgcgattactggctatccgatgttgatgatgtggcgtaatgcctcaaaacgggcagttgggtcgatttcttcaaatgccagcttgctttatcaccgcaatgtaagagttttggataccatcttggcgcgcatgattttggaaattgctggtgcaaccattgcgcagattgtgattatggcggtattgattgcgattggctggattgaaatgccggcagatatgttttatatgctgatggcttggcttttgatggctttttttgcgattggtttgggtttggtgatttgttcgattgcctttaatttcgagccgtttggcaagatttggggcacattgacttttgtgatgatgccgttatccggtgcgttcttttttgtgcataatttgccgcccaaggtacaagaatatgcattaatgattccgatggtgcatggcacagaaatgttccgtgccggatattttggcagcgatgtaattacctatgaaaatccttggtatatcgtattgtgcaatctggtgttgttgttgtttggcttggcgatggtcagtaaattcagtaaaggagtcgagccgcaatgatttcagttgaacacgtttccaaacgctatctgacccgccaaggttggcggacagtcttgcacgatattagcttcaaaatggagaagggcgagaaaatcggtattctcggccgcaacggtgcaggtaaatcgacgctcatccgtttgatcagtggcgttgagccgccgaccacgggtgaaatcaagcggacaatgagtatttcttggcctttggcattctccggtgcgtttcaaggcagtctgaccggtatggacaatttgcgtttcatctgccggatttacaatgtcgatatcgattatgtgaaagcgtttacggaagaattttcggagctggggcaatatttgtatgagccggtgaaacgctattcttcaggtatgaaagcgcgtttggcttttgcgctgtcgttggcggtggagtttgactgttacctgattgacgaagtgattgcagttggtgactcgcgttttgccgataaatgtaagtacgagttgtttgaaaagcgcaaagaccgttccatcatcttggtgtcgcacagccacagcgccatgaagcaatattgcgataatgcgatggtgctggaaaaagggcatatgtaccagtttgaagatatggacaaagcctacgaatattataattcgctgccttaaagcgattgtttttaaatcaggccgtctgaaatttcagacggcctgtccgttggaattctattgatgaacattactcaaattctttcccaagaactctccgcgactgccgcgcaaatcaccgccgccgtcgagcttttggacgacggcgcgaccgtgccgtttatcgcccgctaccgcaaggaagcgacgggcgggttggacgatacgcagttgcgccggcttgccgagcggctgcaatatctgcgcgagttggaagagcgcaaagccgttgttttaaaaagcattgaagagcaaggcaagctttcagacgacctcagggcgcaaatcgaagccgccgataacaaaaccgcgctggaagacctgtatctgccctacaaacccaaacgccgcaccaaagcgcaaatcgcgcgcgaacacggtttgcagccgctggcggacgtgttgcttgccgagcagtcgcaggacgtggaagccgccgcacaaggctacctgaacgaaaacgtccccgatgccaaagccgcgttggacggcgcgcgtgcgattctgatggagcagtttgccgaagacgcggaacttatcggcacgctgcgcgacaagctgtggaacgaagccgaaatccacgcgcaagtcgttgaaggcaaagaaaccgaaggcgaaaaattcagcgattatttcgaccaccgcgaacccgtccgcactatgcccagccaccgcgcgctggcggttttgcgcggccgcaacgaaggcgtgttgaacatcgcgctcaaataccagcccgacgacacgccgattacccggcaaagcgaatacgagcaaatcatcgcctgccgcttcaaggtttcagacggccacaaatggctgcgcgataccgtgcgtctgacttggcgcgcgaaaatctttttgtcgttggaacttgaagccctaggccgtctgaaagaagccgccgacaccgacgcgattaccgtgttcgcccgcaatctcaaagacttgctgctcgtcgcgcccgccggacggctgaccacgctgggtctcgaccccggctaccgcaacggcgtgaaatgcgccgtggtggacgacaccggcaagctgctggataccgtcatcgtctatttgcatcaagaaaacaatatgttggcaacgctgtcgcgcctgattaagcaacacggcgtgaagctcatcgccatcggcaacggcaccgccagccgcgaaaccgacaaaatcgcgggcgaactggtgcgcggaatgccggaaatggggctgcacaaaatcgtcgtgtccgaagccggcgcgtcgatttattccgcgtccgaactggcggcgcgcgagttccccgacttggacgtttccctgcgcggcgcggtgtccatcgcccgcaggctgcaagacccgcttgccgagttggtcaaaatcgaccctaaatccatcggcgtgggccagtatcagcacgatgtgaaccaaaaccagctcgccaaatcgctggacgcagtggtcgaagactgcgtgaacgccgtcggcgtggacgtgaataccgcctccgccccgctcttggcgcggatttccggcttgaatcaaacccttgcccaaaacatcgttgcctaccgcgatgaaaacggcgcgttcgacagccgcaaaaaattgctgaaagtaccgcgtttgggcgaaaaaaccttcgagcaggcggcaggctttttgcggattaacggcggtaaagagccgttggacgcgagcgccgtccaccccgaagcctatcccgtcgtcgccaaaatgctggcgcaacaaggcattagcgccgccgaactcatcggcaaccgcgagcgcgtgaagcaaatcaaagcgtccgacttcaccgacgaacgcttcggcctgccgaccattttggacatcctgtccgaactggaaaaacccggccgtgatccgcgcggcgagtttcagacggcatcgtttgccgaaggtatccacgaaatcagcgacttgcaagtcggtatgatactcgaaggcgtggtttccaacgtcgccaacttcggcgcgttcgtggacatcggcgtccatcaggacggcttggtgcacatctccgccctgtccaacaagttcgtccaagacccgcgcgaagtggtgaaagctggcgacgtggtgaaagtgaaagtgctggaagtcgatgctgcacgcaaacgcatcgcgctgaccatgcgcttggatgacgaaccgggcggcgcaaaacataaaatgccgtctgaaaaccgcagccgcgaacggacagccggccgcaaaccccaacgcaacgaccgcgccccagccaattcggcgatggcggatgcgtttgcgaagctgaagcggtaaaataatcgaagagtttatggattttgacttatgcacacaccacttacctatattgaccttttctcaggagcaggaggcctatccttgggttttgaacaagccggattccaacaattgctttctgttgaaatggagtctgattattgtcagacttaccgtaccaacttcccccatcatcaattactgcaaaaagatttaaccacactaaccgaacaagatttaatcaattgtcttaacggacaagcagttgatttgattattggaggaccaccttgtcaaggttttagtatggcaggaaagattggacggacatttacagatgacccacgcaaccatttatttaaagagtttgtccgaatagttaaaattgtccaaccatatttttttgttatggaaaatgtagcgcgactctatacacacaattcaggtaaaacacgtattgagattattcaagcatttcagaatatcggttattcggtggaatgtaagatactgagtgcagccgatttcggtgttcctcagatacgtagccgagtgatatttatcgggaggagggataaaggcaaaatttcctttcccgaacctttgcagatttcccatcagactgttggatcagcaataggacattttccaaaactggctgctggcgaaagcaatccacacgttgcaaatcatgaagctatgaatcattcggcacaaatgttagaaaaaatggcatttgttaaaaatggaggtaaccgtaacgatattcctgaaccattacgtccgaaaacaggtgatatccgtaaatacatccgttacaacagcaacaaaaccagccgtttgtattacaggagatatgcgcaaagtttttcactatgaacagaatcgggcgttaaccgttcgtgaattagctgccttacaatctttccctgataattttattttttgcggcagcaaaattgcccagcagcagcaggttggtaacgccgtaccgcctttattggcaaaagctattgctgaaagtattttaaaaatgagtgaaaatgaataagcaatatccgaaaattaactatatcggtaataaagagaaaatagcttcctggatttgtgaccagcttccgtctgatgtagatacagttgcagatgtatttagtggaggctgttcctttgcctacgaagccaaaaaacgcggctatcgtgtgattactaacgatattttggcaattaattaccaaattgctttagcattaatagaaaacaaccatgaaacattaaatgacgatgatgtcgcaatgattttttcaggcagcccgcatgccggttttatgagtcagcgttatgccgaaaaattctattttcacgatgaataccaacaacttgatttgtaacgtaaaaatatagggaaactggataaccagtataaacgcgctttggcgtttactttaatgcgtcgcgccatgatacgtaaaatgccctatacggaagatatgcgcccaggcgataccgctaatccttatggtgcgtccaaagcgatggtggaacggatgttaaccgacatccaaaaagccgatccgcgctggagcatgattttgttgcgttatttcaatccgattggcgcgcatgaaagcggcttgattggcgagcagccaaacggcatcccgaataatttgttgccttatatctgccaagtggcggcaggcaaactgccgcaattggcggtatttggcgatgactaccctacccccgacggcacggggatgcgtgactatattcatgtgatggatttggcagaaggccatgtcgcggctatgcaggcaaaaagtaatgtagcaggcacgcatttgctgaacttaggctccggccgcgcttcttcggtgttggaaatcatccgcgcatttgaagcagcttcgggtttgacgattccgtatgaagtcaaaccgcgccgtgccggtgatttggcgtgcttctatgccgacccttcctatacaaaggcgcaaatcggctggcaaacccagcgtgatttaacccaaatgatggaagactcatggcgctgggtgagtaataatccgaatggctacgacgattaagttgacctgatacaggccgtctgaaagagatgttttcagacggcctctttatctgaaaaacacacattctgtctgctataatctgtttatattttttggctatcctctgaaatttatgagaaaaatccttgttaccggcggcgcgggctttatcggttctgccgttgtccgtcatattatccgaaacacccgggacgctgtcgtcaatgtcgataagctgacttatgccggcaatttggaatctttgactgaggtagccgataatcctcgctatgcttttgaacaagtggatatttgcgaccgcgccgaactcgaccgcgtattcgcgcaataccggcctgatgccgtgatgcacttggcggcggaaagccatgtcgaccgctctatcggttcggcaggcgagtttatccaaaccaatatcgtcggcacattcaatctgcttgaagcagcccgcgcctactggcaacaaatgccgtctgaacagcacgaagccttccgtttccaccatatttccaccgatgaagtctatggcgatttaggcggcacggacgatttgtttaccgaaaccgcgccctacgcgccgtccagcccctactctgcctctaaagcgtccagcgaccacctcgtccgcgcgtggttgcgtacttacggcttgccgaccattgtaaccaactgctccaacaactacggtccttaccattttccggaaaaactcattcctttgatgattctgaacgcgcttgacggcaaaccgctgcctgtgtacggcgacggtatgcaaatccgcgactggctgtttgtcgaagaccacgcgcgcgcactgtatcaggttgttaccgaaggtgttgtcggcgaaacctacaatatcggcggccacaatgaaaaagccaatattgaagtcgtcaaaaccatctgcgccctgctggaagaactcgctcccgaaaaaccggccggtgtggcgcgttatgaagatttgattactttcgtacaagaccgccccggccatgacgtacgctacgccgtcgacgcagccaaaatcaggcgggatttgggctggctgcctttggaaaccttcgagtccggcctccgcaaaaccgtgcaatggtatctggacaacaaaacctggtggcaaaatgtattgaacggcagctatcgtttggaacgtttaggtactggaaaatagttttcagacggcatcccgacgcaatgccgtctgaaaacccatcgcaaaggaagaaagaaaagatgaaaggcatcatactggcaggcggcagcggcacgcgcctctaccccatcacgcgcggcgtatccaaacagctcctgcccgtgtacgacaaaccgatgatttattaccccttgtcggttttgatgctggcgggaatccgcgatattttggtgattaccgcgcctgaagacaacgcctctttcaaacgcctgcttggcgacggcagcgatttcggcatttccatcagttatgccgtgcaacccagtccggacggcttggcacaggcatttatcatcggcgaagaatttatcggcaacgacaatgtttgcttggttttgggcgacaatattttttacggtcagtcgtttacgcaaacattgaaacaggcggcagcgcaaacgcacggcgcaaccgtgtttgcttatcaggtcaaaaaccccgaacgtttcggcgtggttgaatttaacgaaaacttccgcgccgtttccatcgaagaaaaaccgcaacggcccaaatccgattgggcggtaaccggcttgtatttctacgacaaccgcgccgtcgagttcgccaaacagctcaaaccgtccgcacgcggcgaattggaaattaccgacctcaaccggatgtatttggaagacggctcgctctccgttcaaatattgggacgcggtttcgcgtggctggacaccggcacccacgagagcctgcacgaagccgcttcattcgtccaaaccgtgcaaaatatccaaaacctgcacatcgcctgcctcgaagaaatcgcttggcgcaacggttggctttccgatgaaaaactggaagaattggcgcgcccgatggcgaaaaaccaatacggccaatatttgctgcgcctgttgaaaaaataatgtttgaggccgtctgaaacttttcagacggcctttagatgaaagataaaaagatgaacatcattgataccgccattcctgacgtaaaactgcttgagccccaagtcttcggcgacgcgcgcggcttttttatggaaaccttccgcgacgagtggtttaaaacccaagtctgcgaacgcaccttcgtgcaggaaaaccactccaaatccggcaaaggcgtattgcgcggcctgcactatcaaactgaaaacacacaaggcaaactcgtacgcgtggttgtcggcgaagtattcgacgtggccgtcgatatgcgtaaagactcccccactttcggcaaatgggtaggcgaaattctgtccgcagaaaacaaacgccaactgtgggtacccgaaggtttcgcacacggcttctatgtactgagcgatgaagccgagttcgtctataaatgcacagactattacaaccccaaagccgaacactcgctgatttggaatgatccgaccgtcggcatcgactggccgttgcaaggcgagccgaacctgtcgcctaaagacttggcaggcaaagtattgtctgaagcggtaacgttttaaaaataattcaggccgtctgaaagaatgttcctcttttcagacggcctacaatccattaataacaataatcgacgaaaacgcattgtgaaaaacgcctacatcccctctcgcggcatccgcaaaatcccccatctctccaccctattgcctgaatttcatatctgcaaagacgggaaagaagcagaggctgttgtcggctggggtttgcgcccgacgacacacaaagcgcgtgcttttgccgctgaacaccagcttccctttattgctttggaagacggctttttacgatcgctcggactgggtgtcgccggttatccgccctactctatcgtctatgacgacatcggcatctactacgacaccacacgtccttcgcgtttggaacaactgattcttgccgccgataccatgccgtctgaaaccttggctcaggcgcagcaggcgatggatttcatcctgcaacaccacctgtccaaatacaaccacgcgcccgaactttcagacgaccatcctttacgttccccatccaaacccgaaaccgtcctcatcatcgaccaaaccttcggcgatatggccatccaatatggcggcgcagacgcctctacgtttgaactgatgtttcagacggccttaaatgaaaacccgcaagccgatatctgggtaaaaacccatcccgatgttttgtgcggcaaaaaacaaggctatctgacccaactggcgcagcaacaccgcgtccatcttttggcagaagacatcaatccgatttctttgttgcaaaacgttgataaagtttattgcgttacctcgcaaatgggttttgaggcgcttttgtgcggcaaaccgctgaccactttcggcctgccgtggtatgccggatggggtgtaagcgacgaccgccatcctgaaatcaaccgccttgttcaaacccaacgccgcgccacccgcaacttgctgcagctcttcgccgcagcctatctgcaatacagccgctacctcaaccccaataccggcgaagcaggcagcctctttgatgtcatcgactatctggcgacggtcaaacgtaaaaacgacaaattgcgtggcgagttatattgcgtcggtatgtctttgtggaaacgcgcggttgccaaaccgttctttaacgtaccctcttgccgtctgaaatttatctcttccacccaaaaactggcaagggtcaaactgtccgacgatgcacgcatcctggcttggggcaacggcaaagaggccatcgtccgctttgccgaacaacaccacatccccctgctgcgcatggaagacggctttatccgctcggtcggactcggctccaacttagtgccgccgctgtcgctcgttaccgacgatatgagcatttatttcaatgccgaaaccccgtcccgtcttgaatacatcctacaaaaccaaaacttcgacgatcaagactttcagacggccttgaagctgcaaaaaatgctgaccgaaaaccacatcagtaaatacaacgtcggcagctcagacttcaccgccccgtcaaccgacaaaaccgtgatcctcgttcccggccaggttgaagatgatgcgtctatccgctacggttcgccccaaatctaccgcaatctggatttgctccgtaccgtacgcgaacgaaaccccaatgcctatatcatctacaaaccgcatcccgatgtagtcagcggtaaccgcatcggccatatttcccctgaagatgctgcacgatatgccgaccaaaccgccgaacaagccgacatcctgacctgtctccaatacgcagacgaaatacataccatgacttcgctgaccggttttgaagccttgttgcgcggcaaaaaagtcagctgctacggcctgcctttttacgcaggctgggggcttacccaagatctgctccccatcccgcgccgtagccgcagacttgagctttggcagctgattgccggcacgctcatccactatcccgactacatccaccccgaaacccatcaggccataaatgcagaaaccgcagcccaaatcctgatacgacaaaaaaatatgcaaaaaaacaacaacggattacatcgcgggtgctttgccaaaaaattaggtaaaatcaaacaactatatcgatctttcaaataaataccatcaaagttaacgatgcgtcataaacttgcctctattgcggcatcattgcctttgcatcgttaattctcttggcgtatgcttgaaagttcaacctaaaactattacataaaaaacaaaaccacattgcaacatgaaacagaccgtcctcaaaaataacctgcaaaacctgcttgaaagcgcagaaaatatcctgctgcttcaaggccctgtcggcgatttttttctgcgccttgccgactggctgactgcaaacggcaaaaccgtacataaattcaactttaatgcaggcgacgactatttttatccgcccactcaagcgcataccgttgtttttaacgacaactacgatgcctttcctgagtttttgcaagaatacatcactcaacatcacatccaggccgttgtctgctttggcgacacacgcccttatcacgtcattgcaaaacgcattgcaaacgaaaaccaagccagtttctgggcgtttgaagaaggctatttccgcccctactacatcaccttagaaaaagacggcgtcaacgcattttccccgttgccgcgccgtgccgacttttttcttgaacaattccctaagcttgcccagcaagaatataaagcgccaacgccggtacacggcggttttacgcccatggcaaaaaacgctatccgttactatatcgagttgttccgcaatccacgcaaataccccgactacatccaccaccgcgcacccaatgccggccattacctcaaaccgtggtcgctctccatcctcaagcgtttgaactactatattgaagacatccaaatcgccaaacgtgtggaagcaggcaaatacggcaagttttttattgttcccttacaggtattcaacgacagccaagtccgtatccattgcgactttcccagcgtccgcagcttcctgctccatgttttgagttcatttgccgagcacgcgcctgccgataccaacatcatcatcaagcatcatccgatggaccgcggttttatcgactactggcgcgacattaaacgctttatcaaagaacaccccgaactcaaaggccgtgtgatttatgtccatgatgtccccctgcccgttttcctgcgccacggtctcggcatggtcaccatcaacagcaccagcggcctgtccggactgattcacaatatgccagttaaggttctcggccgtgcctattatgatattcccggcattactgaccaaaataccttggcagaattttggaatcatccgacaccgcctgacaaagagctgttccatgcctaccgaatgtaccacctcaacgtgacccaaattaacggcaacttctacagtcaggtgtttttccccaacaaaaaaacctccaactcttccacaccagtaatctgacttagcgaaggaagttcaggccgtctgaaaacatttcagacggcctgaaacaatcaataccttagctactgccatgtaaataaaacacaaaaatctgcatttatcattaacaataaattacaaaaacagtataatgaccgagctgccatgagcgcataccgactcaacctgagccctttgtaacacacaaaatatggatatatccctaggcaaaacaatataacaagccaaacatcctaaagataagccggcaaggcaatacactctataaaactatgccgagcaaaatttttacaaagccctcaaccggtatcgccgcccatatgccgcagcatccgtcttccactttatatccgcccgcaaaccatgaccgccgctcctgatatcctctaccggcaagccgccgcccttttggaacaatccaataccgcccaagccctgcccctgttgcaacaggcggcagagcaaggttatgcggaagctgctttcgtattgggcaaccatctgctgcaaaacggccaaccggagcaggcactttcatggttggaagccgccgcggcccaacgccatcccaaagcactcttctccctgctgcaacaacgcgaacacaacggcaccccgaccggacagcttctcaacgactatgcctggctgggtgagcaggggcactcagaagcccaattaatcctcatgcgttaccacgcgcaacgcaacgatccacaatcgctctactgggcggaacttgctgccgcccgatatgccgcacctgcgtattaccatctggcacgccatcatcaacgccaaggcgacgttgaaacagccatcgaacaatacgaaaaagcggcagcactcggcgtaactgccgcctgctggcaacttggtcaaatctacttctacggtacaggtgtcagccccaaccacgcacaagccgaacactatctcgaaccagccgcacaagccggccacatcgccgcacaaacgctgctggctgaccttcttgccgcccaacgcaaacctgaagccttggaatggtatcgtcgtgccgccgataaggaacaagcggaagcacagtctaagctggcccaatacgccctgaccggcgaactttccgaacgcgatccgttccaagcggcacgatatgccaaagccgctgccgagaaaaaccatcctgaagccctgaaaatcatgggcgacctctaccgctacggtctcggtatcaaagccgacaaccatatcgcgcaagattactaccaccgtgccgccgcgctgggttctgccgccgcagcacaaaaactcatcagcgacgccgcgctgtaccatccgcaacaatacgaacaaatcaaaactgccgcctgcaacaacaacaaaccgaaaccatctaccgtttggcggaagcacaagcctgcgccatcggccgtcccgccgactacaatgccgcgcgaaaaaattacatggaagctgccgggttccaccataaaaacgcagcggcagccttaggccgcatctaccattacggcctcggtacggcgcaagatcctcgggcggctgcacactggtacgccattgctgccgaacaaaaccacccttccgcccaataccacctcgcctgtttttactatcacgggcaaggtgtcggctgtcatgttccgaccgcctgctactggctgcaggccgccatcggcaacggccacacttcggccgaatcattaatatccctattagaacaatggcgacgcgaagcacaccatgccatcggacaaaaggccgtctgaaaagatttacactcgcattttttgacaatctttaactattcccctaatatttgccagttatttttcacggacacgccattgttttcatttctttctgaaaacaccttgtccgcgcatcaataccatgacactcggcggataacgccaagcgttgaaacacactacatccggaacaaaaacggatgctcggaaaaatatttctaggaggtgaaacaacatggaatgggaattcaacagttattacacactgattgccgccacgctcgtgttgctggttggtaaatttctggttcaaaaaatcaaattcttacgagacttcaatattcccgagccggtagccggcggtttgattgccgctatcgtcctgttcgccctgcacgaggcgtacggcgtgagcttcaaatttgagaaaccgctgcaaaatgcgtttatgctgatttttttcacgtccatcggcttgagcgcggatttttcccgtttgaaggcgggcggtttgccgctggtggtttttaccgcgattgtgggcggatttatcttggtgcaaaactttgtcggggtcggactggctacggctttgggtttggatccgctcatcggtctgattaccggttcggtgtcgctgacgggcggacacggtacgtcaggtgcgtggggacctaattttgaaacgcaatacggcttggtcggcgcaaccggtttgggtattgcatcggctactttcgggctggtgttcggcggcctgatcggcgggccggttgcgcgccgcctgatcaacaaaatgggccgcaaaccggttgaaaacaaaaaacaggatcaggacgacaacgcggacgacgtgttcgagcaggcaaaacgcacccgcctgattacggcggaatctgccgttgaaacgcttgccatgtttgccgcgtgtttggcgtttgccgagattatggacggcttcgacaaagaatatctgttcgacctgcccaaattcgtgtggtgtctgtttggcggcgtggtcatccgcaacatcctcactgccgcattcaaggtcaatatgttcgaccgcgccatcgatgtgttcggcaatgcttcgctttcgcttttcttggcaatggcgttgctgaatttgaaactgtgggagctgaccggtttggcggggcctgtaaccgtgattcttgccgtacaaaccgtggtgatggttttgtacgcgacttttgttacctatgtctttatggggcgcgactatgatgcggcagtattggctgccggccattgcggtttcggcttgggtgcaacgccgacggcggtggcaaatatgcagtccgtcacgcatactttcggcgcgtcgcataaggcgtttttgattgtgcctatggtcggcgcgttcttcgtcgatttgattaatgccgcgattctcaccggttttgtgaatttctttaaaggctgattttccgcctttccgacaaagcacctgcaaggtttaccgcctgcaggtgcttttgctatgatagccgctatcggtctgcaccgtttggaaggaacatcatgtatcggaaactcattgcgctgccgtttgccctgctgcttgccgcttgcggcagggaagaaccgcccaaggcattggaatgcgccaaccccgccgtgttgcaaggcatacgcggcaatattcaggaaacgctcacgcaggaagcgcgttctttcgcgcgcgaagacggcaggcagtttgtcgatgccgacaaaattatcgccgccgcctacggtttggcgttttctttggaacacgcttcggaaacgcaggaaggcgggcgcacgttctgtatcgccgatttgaacattaccgtgccgtctgaaacgcttgccgatgccaaggcaaacagccccctgttgtacggggaaactgctttgtcggatattgtgcggcagaagacgggcggcaatgtcgagtttaaagacggcgtattgacggcagccgtccgcttcctgcccgtcaaagacggtcagacggcatttgtcgacaacacggtcggtatggcggcgcaaacgctgtctgccgcgctgctgccttacggcgtgaagagcatcgtgatgatagacggcaaggcggtgaaaaaagaagacgcggtcaggattttgagcggaaaagcccgtgaagaagaaccgtccaaacccacgcccgaagacattttggaacacaatgccgccggcggcgatgcgggcgtaccccaagccgcagaaggcgcgcccgaaccggaaatcctgcatcctgacgacggcgagcgtgccgataccgttaccgtatcacggggcgaagtggaagaggcgcgcgtacaaaaccagcgtgcggaatccgaaattaccaaactttggggaggactcgataccgacgtgcaaaaagagttggtcggcgaacaacgcaagtgggcgcaggaaaaaatcagcaactgccgacaagccgccgcgcaggcagaccggcaggaatacgccgaatacctcaagctgcaatgcgacacgcggatgacgcgcgaacggatacagtatcttcgcggctattccatcgattaggggcaaaccgatgaataccgtcccaaaaagcaggattcccgtcaaaccgctgcccgaaaaaaccacagacgaagccaaagtcgaaaaatggcggcagctcggtgcggaacacggtttgtcgggcgaatgggcagttgccgtcagattgggcgaaaacggttttaccgaagaacagatggaaaatatcgccaacctgttcggcagataaagagaaaattgacggaaatgccgtctgaaaccctgttatcggtttcagacggcattttgaccaatacggtacgcaggcgcaaaacagccggcttttcctgtgttgcctatgctgatgtttcaacacacaggacgatacaaaaaacgtcgccctatgtgccgtcctgattcggaagggttacgctccttccaaatatagtggattaacaaaaaccggtacggcgttgtctcgccttagctcaaagagaacgattctctaaggtgctgaagcaccaagtgaatcggttccgtactatctgtactgtctgcggcttcgttgccttgtcctgatttttgttaatccactataaatcgagcctaaaacaatgccgtctgaaacggaaatctgtttcagacggcattgttacattcaaacggcgggccgtttatttgaatttgtaggtgtattgcagaccgatgatgtcggcgtggtttttgaaacgtgcggaagacgcgcctttgctgtccacatcgttgccgcttgccttcgccgtgcggtagctggtgtcgttgatgtggatgtgggtgtaggcggcatcgacgacgtggtttttaccgatatggtatttcataccggcggagaaccagatgcggttgccgtcgggtaggctgttcatgcggtagtcggcgttgcggacgggcgatttgtcaaaagcgatgccggcgcgcagttgcagcggttcgctgatttgataagaaccgccgaagccgactttgtaggtgttgcgccagttgggggtgatggtggtgcggtcggatttgcctttgacgacggttttttctttttcaaaaaccagttccgccttatcgaagcggctgtggcgcgtccaagttacgtcgccgaacaggtcggctttatcggacactttgtacataccgtgtacggacaaagactcaggcgtaacgattttaacgcgggctttttcattcgccgtgtagccgtttgctgcaagcatcgtactccacattgctttcgccgccgcgccgtctgccgcccattcggcatcgcctttgagcgtgtgcgagactttggaacggtagttcacgcccacgcgcgcacggtcgttgatgtcccacatccacgccagttggtagccgaagccccaatcgctgcctttgacatcggcgtgtccgtcggcctgaatttttgcagcttcggctacaccgttaggtttgggcggttttgccgtcaatatctctgctttactcttaatcccccagtcggcatatttgcgcagttcggcggaagtatgttgggcgatgatgcctgcgccgaaggaatggcggtcgttgagtttccacgcggcgacaggttcgacggcgatgctggtcagaccgagtttgttgatgttgtggcgcaacacggaatctttttcgtattcggtggcagagccgaaggggacgtacacgcccaagcccacggtcagattgtcgttgactttgtatgcgccgtagatgtggggcgcgaccgtggttttggtgattttgccgcttttcgaaccttggacgggaagcccggtaaagtcggtggcggaatccgcctcataatgaatgctgggcagcacgatgttggcgttgacggaaatctggctgctgtcgagtttggtcaggccggcagggttgtagaagatggtcgatgcgtcggcggcttctgcggcggcggcatttgccgtgctttgcgcgttgaccgactgtgtgccgaagtggtagccggatgcgtggacggatgcggcggcaaaggcagtgccgagcagcaggacggtttttttcagtgcggaaggggtcatttcggtttccgtaaaaaggcggacggtggataaatatagtggattaacaaaaatcaggacaaggcgacgaagccgcagacagtacagatagtacggcaaggcgaggcaacgctgtactggtttaaatttaatccactataaaaaaggcagtcggaaatgccttgtttcgctttagtataggtactcgattttatccgatgttgccggatttgcacaattttttcagagtttgcccgaaccgccgcgccgccgcaaaaaatgccgtctgaagcctcgggcatcggcttcagacggcattttccactcagggcggattatttgacgcgcagcacttccagtgtgttggtcgaaccggattcgcgcatttgcgaaccgctggtaatgatgtattggtcgccggaatgcaggatgttgtgttccaccagcatcgtttcgacttcgtttaacgccgtgtcgtggtcggtactggttgccaaaatcagcgggcgcacgccccggtacatcgccatacggcgttgggcggaaacgctcggggtcagcgcgaaaatcggcagggtgatgttgtggcggctgatttcaaaggcggtcgaaccgctttcggtcagggcgacgatggctttggcgtgaaccgcgcgcgccacgctgaccgcaccgccggcaaccgccaggttggtgctgaccgcttcgggatactcgacctgttcggcaacgccgttgagcgaatcctgctctttttccgcagccgcgcagataatcgccatttggctgacggtttcaaacggatacgcgccgacggcggtttcggcggaacacatcaccgcatcggtaccgtccaataccgcgtttgccacatcgctgacttccgcgcgggtcggtacggggttggtaatcatcgattccatcatttgcgtcgccgtaatgctgaagcggcgcaactcgcgggcgcggcggatcatccgtttttgcagggcggggacggcggcgtgtccgacttcgaccgccaagtcgccgcgcgcaaccataatgccgtcgccggcgaggatgatttcgtccaagttttcaatcgcttccacgcgttcgattttggaaaccaaaccggggcgcacggccgtgctgcccttcatttcttcttcgactttggcgcgcgcgatatgcaaatcttcggcggatttcacaaagctgatggcgaggtagtcgcaaccgatggcaatcgcggttttcaggtcgcggaagtctttttcggtcaacgcgcctgcggacagaccgccaccgcgtttgttgatgcccttgttgcttttcaggacgtggctgttttccacccttgtgataatcctgctgccttcgacggattccacggtcagggtcagcaggccgtcgtccagccacaagacatcgcctgcggcaacgtcgtcgggcaggtcgcggtagtccaaaccgaccgcctcgcgcgtgccttcgccttcgagcgcggcatccagtaccagcgtttcgcctttgttcaattcgatgccgccgccggcgattttgcccacgcggattttcgggccctgcaggtcggcaatgatggcgatttcctgtccggcgcgttttgccgcctcgcgcacgatgagggcgttttcctgatggaattcgggcgtgccgtggctgaagttgaagcggacgacgttcagaccgccgacgcggatcatgtcttccaacagttcgacgttgttgctgcccggcccaagggtggcgacgattttagtgttgtggctgatgcgggtcagatcgcggcttgtctggttcatatgaaagtccttttggtctcaatcgggtgttttgcggtattttgttacaaaattacagaaatttggaaccggtttgatgtccatttgatgaacgcggcggaatattctgtaaaaatatgatttaaattaatagtttgatattttacctgcaaaccgccttttttggcgcaaaattacacggttttatgacttaggctaaatttattttggggctgtcctagataactagggaaattcaaattaagttagaattatccctatgagaaaaagtcgtctaagccggtataaacaaaataaactcattgagctatttgtcgcaggtgtaactgcaagaacagcagcagagttagtaggcgttaataaaaataccgcagcctattattttcatcgtttacgatgacttaatttatcaaaacagcccacatttagaaatgtttgatggcgaagtagaagcagatgaaagttattttggcggacaacgcaaaggcaaacgcggtcgcggtgctgccggtaaagtcgccgtattcggtcttttgaagcgaaatggtaaggtttatacggttacagtaccgaatactcaaaccgctactttatttcctattatccgtgaacaagtgaaacctgacagcattttttatacggattgttatcgtagctatgatgtattagatgtgcgcgaatttagccattttagcttcgctgaaacttcgttttcgtatcaatcacagcacacattttgccgaacgacaaaaccatattaatggaattgagaacttttggaaccaggcaaaacgtcatttacgcaagtctaacggcattcccaaagcgcattttgagctgtatttaaaggagtgcgaacgacgttttaacaacagtgagataaaagttcttgttccattttaaaacaattagtaaaatcgagtttatcttagttatctaggacagccccgtttgtgtactgaaatgcttcaaaacaccaaaccaagtttcgttttctaaaatacgaaaccattactgctgcctaaatttttttggattgctaaattatggcagtatgattttggattttaaattgaaaggcaagaaaaatgtcaaaaaatgatgtagttaaagtaattggtatattccccctattgtccgaacaatagagcagacttcccggcaggctgcccacatcagaacgcccgttcgctggtttgtacgtcctgaaaaagctcttgcattaagttaatcataatgggaaatttaaatttttttaatgcttacttaaacaaaagccccactccaccattaggagtttctttttcagtatacaagtaaatatttttaaaatattgatttaatttaaaataaaatacttgcaaaaaaagtattaaattaaacttaagaaaggttaattctgatttacatttccaaccatacttctttacaggagaaaatcatgaaagagttacacacctctgaattagttgaagtgtcaggtggcaaattccatatctttgcacagggtggcggcaacctaggtaaaaaagatatggttgctgttggtaaaattggtgcttcctattcccctaacaatagtggagtagagttttctgttagcaagcaatttggatatgtacaaggtcttggtgtacagttttcgaaacctacttttggtattagtaaaaaatggtaagattttttgttttatcctttctgacattaataaatctatgctcattaagcgcatgcaatagccactttacaggaaatatcaatccattaggtactcacaataaagttgctaatcccaattgtgccaatagtgccaatagtcatatcagacaacccagtaggaaaaactatgatccaactgaatatagtgcttggttacagtatatgcatgattgcaaataatgagtaacgatgaaaatttacttttttctcaaccacacttaacaaaggtgaatattatgcaagttttgactttgaatgaaatttaacaagtttctggtgctgcttgtaactggcgtgatttctcaaaaaataccattggtagtgcattaggtggagcagctggtggggcaattgttggttcatttgcaggtggtattggtgctattccaggtgcgaaattcggagctattggtggtgcaatcactggtgctgtacaatatggaagcacttgttggtggtaatattccttaataaaactagggtattttgatattttctattcaaaataccctagtttttcataagaacttaaatacaaaaaggaacaaataatgaaaaaatatagtgattattttaaatatttaatcttttttttgattttactcccaacaaattatctcgtatctcattatgtggtacaaacctcaatgagtatgttaagcattttaagttcttctataataacaacttgccttttttttgtttttacaaatttatcccaatcaaagaaacataaataagtacacatgtctaacaatcactcatttttcagaccagaagtctttgtagctcaacggaacaagtggacaggaccagtaggctgggttgacgcaatgggagctggtattttctctgttgctggcggatacaatatcggtcgtggcatgatgaagccataagataattacatcattaaggaaaaggtaatttcagttacagcaatatgtattgaagttacctttttctatttagattgaacaattttgaaagagaaaaattatgaatactgaaaccatttacgccactgtcttttgcattttagctgcaaccatttctggattattggttaaatttaatgtaattaaaatagaaacatcaatcaatagcaaatttatgttattaggcataagtattttaattattggtatttttctatccatttttttttaagaaataataataaatgtcccacttattccgaaaagaagtctttgtagcccaacaaaataagtggacaggtcaggttatcttgacccgtccattctcttttttatttctgactttttgcgcttttctcattgctctgtgtatcattatctttttgatttttggtagctataccaataaaacaaccgttgaaggtcaattacttccaactatgggggtggttcgtgtttactcttccgatatcggcacgattacgcataaatttgttgaagatggtaactttgtcaaagctggcgaaccattgttcaaactttccacatcgcgttttggcgaaaaaggaaacgtacaagccaaattggcagcagaagccaaccttaaaaaaactttggcattacaagaattggaacgtttaaagcgcattcatcaaaatgagcaaaaaaatgttcataacaacattcatcgtttaaacaatcaattagagaatattaaacagcaaattacagggcaaaatcgtcaaattcgtttagcggaaaaaacccttaacaagaacaagtttttagccagtcaaggcgcagtatcccaacaagataagatgaccgccgaaagccatttattggaacaacgctcacgtttggagagcctaaaacgtgaacaaaataatgcaatcagggaacttgatgaacagaaaatcacattaagcagcctgcctgaacgccataaaaccgaattgagccaactcaaccgtgcgattacggaaatgaaccaagaaattttggattttgatttgaaatccgaacaaaccatacgagctagtaaatcaggttgagacctttgcaaaaataatctgttaacgaaatttgacgcataaaaatgcgccaaaaaattttcaattgcctaaaaccttcctaatattgagcaaaaagtaggaaaaatcagaaaagttttgcattttgaaaatgagattgagcataaaattttagtaacctatgttattgcaaaggtctcaggttatatatcaacaattaatgttgatatagggcaacaagttgaaccgtctaaattgctgttaagcattgtccctgaacaaactgaattggtcgccaatctttacatacccagtaaagctgttggttttattaaaccgaaagataaagttgttttacgttaccaagcgtacccttaccaaaaatttggacatgccacaggagaaattatttcagttgccagaactgctctcggtaaacaaaagctatcaggtttaggtatcattttcactaacccaaccttattaaatgaacctgcctatcttgtgaaagttaaattggaaaaacaaacgattaaagcatacggagaaaacaagccgcttcaaattggcatgattttagaagcagatattctccatgaacgaaaaaattgtacgaatgggtacttgacccactttacagcatttcaggaaaaatcaattaaaaatggattatttatcaagactgtcctttggatttaacaaaaagctacctgtcattctgcaaacagaagttgctgaatgtggtttagcatgcctgacatccatcttgtcctattatggctttcacactgatttaagaacgttacgccaaaaatacaccctgtcattaaagggcgcaaatcttgcagacatcatgagatttggcaatgaaatgaatttaacgccacgagctttgcgtttagagttagatgagctgtcaaatttacaactaccctgcattctccattggaacttaaaccattttgttgtactttgttccatttccaaagacagtatcgtcattatggaccctgctgtcggtatgcgaaaaatcaaaatggacgaagtttcacaaaaattcacagggattgccctagaattattccccaatacccattttgaagagaaaaaagaaacaaagaaaatcaaaatattatctctattaagggggggtcaggcttaaaacgctctttaattcaaatgcttatattagctatttctttggaagtctttgcattggttagtccattctttatgcaatgggtaatagaccatgtcattgtaactgctgataaaaatttattattgacccttactttgggatttggtttactgactatcctgcaacagttaattagcctgttacaagcatgggtaggtatgcacctatctacaactcttaatttacaatggaaagccaatatatttaaaaggttacttgacttacctaatgactatttcagtaaacgacatttaggagatgtgatttcaagatttggttcaatagatcatatccaagaaacactaacttctactttttttgttttagttttaaatagcttaatggctgtttttactttcgtgttaatgacaatttacagcactcaattatcgctgattgttcttttaacacttgttttgtacatactaattcgttggcttgcatattacccattaagaaatgcaacagaagaaaatattgttcatgaagccaaacaaaactcatatttcatggaaaccattcgtggtatccaatcagttaaattatttgataaacattatcaaagacatggcacttggatgagcctatttgtgaatacagtcaataccaagctgacaacagataaactctctgctttatttgaattttcaaataaactgttgtttagcatggaaaatgttatcataatttatcttggtgcaagcgcaattttagatggttcatttacagtcggtgttctgatggcttttttggcttataaagggcaatttgaaagcagaacagcttctctcgttgaccaatacatccaaatcaaaatgttagggcttcatgctgaacgtttggctgacattactttaaatgaaacagaaactgaaattattaagtataatcatatacctaaattagataatgaacaactggttcttaaagttgaaaacgtctcattcagatatgctgataatgagccatatctttttgaaaacattaatttggaatttaaagataatgaagcagttgttttaacaggacaatctggtcgggggaagtccactttgttaaacattttaacaggtagcctaaaacctgaaactggtacagttagtattaatgggcatgatatatatcaagtttctccatcctttattaggggattgagcgggattgttcgccaagatgatgtcctttttgcaggttctattggggaaaatatttcattttttgatgaaagcccaaatatggagctcattgaacaatgtgcaaaaatggcacaaatacatgacgatatacttaaaatgccaatgggctatgagaccttgattggcgatatgggaaatatcttatcaggtggacaaaagcagagagttatcttggctcgtgcattgtataaacgacccaaaattctatttttagacgaagcaagtagccatttagatgtagaaaatgaacaaaaaattaaccataacctaaaaagtcttggtattatgaaaataatggttgcacaccgccaagaaacaattcaatcggcagataaaattctgaatttaggttgaacagaacaagacttcatttttctttaacaaaaagtgaagtcttttttcaaataatttaatagaatacatgaaaatagcggtttaacgttccatttcccaatcatcacgactggctttgtgttttggcgatttttcagtttcctttttctgttgaatttgttgttttttctgctcttgttcccatttttgggctaatttcacggtctcattttcagcccattccatcacggcacaacgatgtagcttttctccgatatcgccattaaagccagctccacgaacttcaccataaattcttgaatatttttgattatattcaatttcttttccattttctttaaaggatttctcccacttttcacaaacttcatcaaaatctttcaaagggatattttttaaggggctgtcctagataactagggaaattcaaattaagttagaattatccctatgagaaaaagtcgtctaagccagtataaacaaaataaactcattgaactgtttgtcacaggtgtaactgcaagaacggcagcagagttagtaggcgttaataaaaataccgcagcctattattttcatcgtttacgattacttatttatcaaaacagtccgcatttggaaatgtttgatggcgaagtagaagcagatgaaagttattttggcggacaacgcaaaggcaaacgcggtcgcggtgctgccggtaaagtcgccgtattcggtcttttgaagcgaaatggtaaggtttatacggttacagtaccgaatactcaaaccgctactttatttcctattatccgtgaacaagtgaaacctgacagcattttttatacggattgttatcgtagctatgatgtattagatgtgcgcgaatttagccattttagcttcgctgaaacttcgttttcgtatcaatcacagcacacattttgccgaacgacaaaaccatattaatggaattgagaacttttggaatcaggcaaaacgtcatttacgcaagtttaacggcattcccaaagcgcattttgagctgtatttaaaggagtgcgaatggcgttttaacaacagtgagataaaagttcttgttccattttaaaacaattagtaaaatcaagtttgtcctagttatctaggacagccccttgttttttgttcggcggcttgcgtggtcgggtaaaatgaaagttttgaacggttggtcggacaggaagatgtggcgggttttgagtgctttgccgataggcgtggtgttttttgatttgatctacggttttgtgttgaatgtgttgcagggtttggatttgcagcgtgccgtgccggattcggaaggcgtgttggcggttacgcccgatattgcattcaacagtttgcagattgtcgccaacggcggtatggcggcggtggtctgtttcgggttggcggttgtgtttttgctcaaccgttcggtgcggcggcggcaggtgttggaaatcggggtgttccggatgttggggctggtggcggtattggcgttcagcgcgccgtcggtgtgggagtgggcgaacgcgctgccgctgctgctgaagggcgcggacgtggtcaatacggggaatgcgcgttatgtgctgacggctttgtgtatgccctttccggcggtgtcgtgcgtcatcgggctggtggggcggttcaggcttcagacggcatcgggcagggcggcaaagtcagggggtgcgggcaaggcggacggataggacgcatttttcagcgggtgcgtcgagaagcagccgatgtgtttggcagccgcagcttggggggtgtagtgctaatggcggtttctttgcttttatagtggattaacaaaaaccagtacggcgttgcctcgccttagctcaaagagaacgattctctaaggtgctgaagcaccaagtgaatcggttccgtactatttgtactgtctgcggcttcgtcgccttgtcctgatttttgttaatccactatataaaataaatgggcaaaaatcggtttattatcgtttttgccgcatttggatttgttctaccgtaaaacgtgtttgacgaacgggattcttattaaaaaacatctgatttctaacaaaatcagtattttttggcacgatggctaaaatttttccttccatttcgccatcacgtgttttccatgcgctcaagaattgtgatttgctcattgagacgtgccccagcgatggatcagccagcaaaacagtttctccgttaataccgttcaataccgaaaaatggttgtttttacggtattttaaatacacaattacaggaatttttagttgtaccaactgttcaaatggcaaagcataaccttgtgcttcaaaacccagttcgggcattatgcgttgcatatcgtcaaaagaagcacgcatttgggttttatccattttgtctaagatttccgcttcagaataatgtctgccataaaaattattcagtaacgtggcaatcgaagccgcgccgcaagaaaaatccaaatcttgttttactatgccggaatctcgccgtgctttccaactccgtacatggatgttttggtaagaagcggggggtcaacaaacataggccaagcaaaaactatatttggggcgaaaccaatcaaagccgcataatttatcaatttataaagattttttatcataatatgtatacgcggaataaacgcatgaaacataaaaaaataaaatcatatgcaattttattgcatgaataaatatgaataaaatagataatgatgggagtaaatacgccatgtattttggaagtttaaatttattaataataaaataatttatcgtagcgcaaataaatcccaaaattggaacgattagaaaaaaaattaatacacccatcatcatgcaaactctatattaataaatagctaactaattctattgtggaaattagttagctaactaaaagttattaatgattattttcgagaattgactgcattgttggcagcattggcaccaaaacctagtgcatgaatacccggtctccatgccaaattcccagccaatccgcctccggcagcagcagccagccctgttttgccgctactcctgttgccgcaccgattcctgtcgcagtagccgcgccttgcgcagttcctaatttaccatgattatacaaattagcaccatgatacccccatgcacctaatgcaccgccaaaagcagcggctgcaataatgggaacaaattcaccttgtgtttctttcatttcagcctgtgataattgaattgctttcacattttggctgtcaaaaacttggctgtctaaattttgcgccattacaggtgtaatcatcatagccattacagttgcaattttcgttgcgctggtttgcacataaataggattagcaaattcgctttgattgcgttcagtgttgatgtagctaatactgctttctagtttgaatttacccttgtcagtcaataattcttccaaacttaaaggtaagtcagcataagcaatttggctggcaacagtcaaaataaaatctattagacatttgtgtttttgcatcatttcgtttgattttctaggttttgagaatgatacaaagttttttacaaagtaaagagtcactctgaaaaaacttttttcattataaatcaaaatattgatagaataaatagcgagcatcgattcacggtgcgctttagtgcaaagcgtacaacgcgagcctgaaccaccagccgcaacaggaaaagaaagccgatagagtgcaatgcttgccaacgtgcaagcgagcttgcaagaacgcttggctcaacgagagcaggcaagacagaaagcagaaagcaggataggagcggtaacgcaaaggtctcgggctttgatttcgccgtaaaccctgctgccgccttgtccggaaagggtgcaggcggcgagtgccgacagggtgcagatggggaggggggttttcatttggggtcgcaacggaagtggtatgcgcagatttcaaaaccgtttttgaaatacaggcggtgcgcgtcggcacggtcgtggttgacgtggacgttgaggtggattttggttacccctgtttccgcgccgattttgcggacttcttccaaaaggcgcgaggcgtagcctttgcggcggctttgcggcagggtaacgatgtcatcgatgtggatgtggcggccgctggcgagggtgcaggcttcgcggaagccgcagacggcgacggcattgtgtttgccttcttcaaaaatacccagcaggcggtagccttgggggcgttggactttgttgatctgttcggtaaagcggttgatgtcggtcagggcggaacgcaaaacgctcaaggctgcaaaggcggtggcggtgtcgtccgcgccgatttcgcgcaaaacgtaggatgcgcccgaggcggtctgttcctgtgctttctcggcggcgtgtttttcttcgattgcctgtgccagcatgacgtgttcgtcggcagggttgttttgtccgccctgttcgcgttcttcgagcagggctttgcagtcgatgacgcgcaggtcgttgtcggcggcaaagtccatcaggaagcggaacatttggggattgtcggtttccagttttttatcgacggcgacgcagcggatgttgtccaccagtatggggcgcacccatttcgaataggaaagcctgtggtctttggtgaacgaggacagaatgccgcacaggcgttccgcccagtcgctgggacggaaaatcttgccggaactcgttgtgccgtggatgacgacttcgtaggggttgcagactaacatggcggcttcctgaaaagaaatgtctagcgcgattataccttatgcttatgcgggcgtgtttggatatgccgtctgaaaagtacgggattcgtgcggtaaaactttgcggcggcaaatgtgcgataatacgcgccgtattgccgcttttgcgaagctgttccgcaaacatacgggcggcgtggacgacgtataaccggatacccgcctgacgcgggttttttacggaaggggggcaaaaatgcctaatccgctttacagacagcatatcatctccatttcggatttgtcgcgcgaacagttggaatgcctgcttcagacggcattgaagctgaaggcgcatccgcgcggcgacctgttggaaggcaaacttatcggttcgtgctttttcgagccgtccacgcgcacgaggctgtcgtttgaaacggcggtgcagcgtttgggcggcaaggtcatcggtttctcggacggcgcgaataccagtgccaaaaaaggcgagacgcttgccgataccgcccgcatcatttccggatatactgatgctatcatccaacgccaccccaaagacggcgcggcgcgcgtggcagcggagttttcgcgcgtccccgttatcaacgccggcgacggcacgaaccagcaccccagtcagacgctgctcgacctggttaccatttatgaaacacagggacgtttggacaagctcaaaatcgccatggcgggcgacttgaaatacggacgtaccgtgcattcgctttgtcaggcgttgaaacgctggaattgtgaatttgcctttgtttcgccgcccagcctagccatgcccgactatattaccgaagagttggacgaagccggctgccgataccgtatcctcggtagtttggaagaagcggcggaatgggcggatatcctgtatatgacccgcgtccagcgcgaacgtttcgacgaacaggaatttgccaaaatccaaggcaaattcaacctcgaagcgtctatgctcgcccgcgccaaaccgaacctgcgcgtgctgcaccccctgccgcgcgtggacgaaatccatcccgatgtcgatgccacgccgcacgcctattatttcgagcaggcgaccaacggcgtttatgcgcgtatggcgatattgtcgctggtgttgaacgaagaagtgtgaggaaccgatatggaaaccccgaaactcagtgtcgaagccattgaaaaaggtacggttatcgaccatattcccgccggcagggggctgaccatcctgcgccagttcaaacttttgcactacggcaacgcggtaaccgtgggcttcaacctgcccagcaaaacccaaggcagcaaagacatcatcaaaatcaaaggcgtgtgcttggacgacaaagccgccgaccgcctcgccctgttcgcccccgaagcggtggtcaacaccatcgacaatttcaaggtcgtgcagaagcggcatttgaacctgcccgacgaaatcgccgaagtgttccgctgtccgaacacgaattgcgccggccacggcgagccggtcaaaagccggttttatgttaaaaagcacaacgggcagacgcggctgaaatgccactactgcgaaaaaacctacagccgggattcggtggcggaagcctgacggattcccttaaaccgagtgggcggcatttcgtctgccgcctgttttgccaatctgaaatggaatgatgatgcacgcttctgtccaaagccgtttcgcaccgatactttatgttttgattttctttgccggttttttgaccgcgcaaatctggttcaatcagaaagcctatactgaagagctgcctccgcttctgtccgcattgtccgccgtcgcgctggtgtggctggcgtgggcgttcgtgtcggcgcgttcaaaggccaaggcggaaaagttctaccgcgaaaaaatgatacagaacgaaagcatacaccccgtcctgcacgcctctttgcaacacttggaacacaagccgcaaatactcgccctgctggtcaaaaaccacggcaaagggatggcggaacaggtcaggttcaaggcggaagtgctgcccgacgacgaagacgcgcgcacgattgccgccgagttggcaaaaatggatatgttcgcattggggacggacgcggtcgcctcgggcgaaacctatggacgcgtgttcgccgatattttcgagttgtcggcggctttggaagggcgcgcgttcaaaggaatgttgaaactgacggcggaatataaaaacatcttcggcgatgcctgccgttcggaaacggcgttggagttgggcgcactcaatcaggcgttgcaggagatttcaaaaacatcggaaaagtccaaacggatattttattgaagatggaaaaatgccgtctgaaacggaaggtgtttcagacggcatttttgtcggatgattaattattcggagcggttgaagccaaacttcacgcggctgcggccctgatccggtatattgtccaaatcgcgtcccggattggcggcggtgtcgcctacggaaatatcggagatgttttccaaaatgatggcggacgacaggtgttcggaggtgcggtaaaccattgccaagcccacttcttcggcaggagtggaaatcagctcgacggtatccctgcttttgaaattgttggagaggtcgacctgcatcgttttcttgcgtttgtagaggctcaaaaccgtgcctttgtccaaaccgtccgcctcgcctttgtcgatggtgatggtttgaaactggccggcaatccttgtgccttcaaacacggaaacgattttagcctgaaccgggcgggacggttcgtgcggcatcatgttgaagcggtcggtgtcttccggcattttcatcaggtagtcgccctgctgtatttcggaaatggcggtttcgaccaccagcggctgtatcgaaggggtgcgcagcggggtaatcaaaggatgggtgcgggtatggtattcgttgtctttcggccgttctccagcctgtttcgagcgttgttcgaggacagagtcggtatagtcgagggagcgcacgatgccgctgaatgcgacttcctgcccgaggaatttacccgtatccggatcggtgatgtttttattgattcggtaggtcaggtagcggcccggctctttcaggcctttggtgtaaaccctggtgcctttggtgtacagcagcctgccttccgggcccgagagcaggcgcggcgcggcagcggtttctttgcgggaaacgatttgcggatgccgcataaagatgcggtagaagttgacatcgatggcgggaataccgtatccggacacttccttatccggactcattttgacgacggggatgccgtctgtctgttccaagccgaggcgcggttcgccgtcaacgtggcgcaacaccaatacctggtccggataaatcaggtcgggattgtggatttgatcccggttcgcgtcccacaggcggccccattgccacgggctgtacaggtatttgcccgaaatgccccacagggtgtcgccctgtttgaccgtgtagcgttccggcgcgttcgggcgcacctccaaatttgccgccaaagtttgtgttgagaatgccatacctgccgcgcagagcagggttataatacgacgttgcataaccgttccccttatctgataaatttcggtttgtcttgcttgattgggttggaaaaagcggcggcagcccctcgggatgtgccgcgtgataaaaaatgttccgcattttaacatcgaattatccgcaccatcacggtaattatgaaaaacaggcggcgtatccgccgaaggaaagagaaaattatggctttattgaatatcttgcaatatcccgacgagcgtctgcacacggtggcaaagcctgtcgaacaagtcgacgagcgcatccggaagctgattgccgatatgtttgaaacgatgtacgaatcgcgcggcatcgggctggcggcgacgcaggtcgatgtgcacgagcgcgtggtcgtgatggatttgaccgaagaccgcagcgaaccgcgcgtgttcatcaaccccgtcatcgttgaaaaagacggcgaaaccacttacgaagagggctgcctgtccgtgccgggcatttacgacaccgtaacccgcgccgaacgcgtcaaggtcgaggctttgaacgaaaaaggcgaaaagttcacgctggaggcggacggcttgttggcgatttgcgtgcagcacgagttggaccacctgatgggcatcgtgtttgtcgaacgcctttcccaactcaagcaggggcggattaagaccaagctgaaaaaacgtcagaaacatacgatttgacccttttgccgtgccgtctgaacgctgcaaagttttcagacggcacggtcttgtccgacaattttacgcacgcgcaggaacacgctatgaaagtcatcttcgccggcacgcccgattttgccgccgccgccttaagagccgttgccgccgccggttttgaaattccgctggtgctgacccagcccgaccgtccgaaagggcgcggtatgcaactgactgccccgcccgtcaaacaagccgcgctggaactcggtttgcgcgtcgaacagcccgaaaagctgcgcaacaacgccgaagccctgcaaatgctcaaagaggtcgaggcagacgtaatggtggttgccgcctacggtttgattctgccgcaggaagtgttggatacgccgaaacacggctgcctcaacatccacgcttcgctgttaccccgttggcgtggcgcggcgccgattcaacgcgcgattgaagccggcgatgccgagacaggcgtgtgtattatgcagatggacatcggtttggacaccggcgatgtggtcagcgaacaccgctacgccatccaaccgaccgataccgccaacgaagtccacgacgcgctgatggaaatcggtgcggcggcggttgttgccgatttgcaacagcttcaaagcaaaggccgtctgaacgcggtcaaacagcccgaagaaggtgttacttacgcgcaaaaattgagcaaagaagaggcgcgtatcgattggagcaaaagcgcggcggttatcgaacgcaaaatccgcgccttcaaccccgtgcctgccgcgtgggttgagtatcagggcaagccgatgaaaatccggcgggcggaagtggtggcgcaacaaggcgcggcaggcgaagtgttgtcctgttcggcggacggtttggtcgttgcctgcggcgaaaacgcgctgaagattaccgaattgcagcctgccggcggcaggcggatgaatatcgcggcgtttgcagcaggacggcatatcgaagcaggggcgaagctgtaaatcccttcagacggcattccgatccgcaaacgggaatgccgtctgaaaccatcagtcgaagaaagcgaatcacataatatgagtatggcacttgcccaaaaacttgccgccgacagcattgcggcggttgccgaaggacgtaaccttcaggacgtgttggcgcaaatccgcaccgcgcatcccgaccttatggcgcaggaaaacggcgcgttgcaggacatcgcctacggctgccagcgttatttgggcagtttgaaacatatgctcgcgcagatgctgaaaaagccgattggcaatccgcagctcgaaagcctgcttttggcggcgttgtaccagctgcattacacgcgcaacgcgccccacgccgtggtcaatgaggcggtggaaagcatcgcgaaaatcggacgcgggcagtaccgttcgtttgccaacgcggttttgcgccgctttttgcgcgaacgcgacaagcttgtggcttcctgtaaaaaagacgatgtagcgaaacacaacctgccgctgtggtgggtggcttacttgaaaaaccattatccgaaacactggcacaacatcgccgccgcgctgcaatcccatccgccgatgactttgcgcgtcaaccgccgacacggcaatgccgaaagctatttggaaaaactggtggcggaaggtatcgcggctaaggcgttggacgaatatgcggttacgttggaagaagccgtgccggtgaaccgcctgcctggtttttcagacggcattgtttcggtacaggacttcggcgcgcagcaggcggcgtatttgttaaacccgaaagacggcgaacggattttggacgcgtgcgccgcgccgggcggcaagacggggcatatcttggaactggcggattgccgtgttaccgccttggacattgatgcaggccgtctgaaacgggtggaagacaatatcgcgcgtctgggctttcagacggcatcgacggcgtgtgccgatgcacaggacctgtcggcatggtatgatgggaaaccgtttgatgccgtccttgccgacgtgccgtgtaccgcctcgggcgtggcgcggcgcaatcccgacgtgaaatggctacgccgtccgaccgacgcgctcaaaaccgcccgccagcaggaagccctgctagatgcattgtggcaggtgctgaaaagcgggggaaggatgttgatcgctacctgttccgtgttcgtcgaggaaaacgacggacaattgcaaaaattcctcaaccgccatgccgatgcagaactgatcgaatcgcgggtactcttaccgaacaaacaccaagatggcttttattacgcgcttattcaaaagcagtaaatggctgattgtgccgctgatgctccccgcctttcagaatgtggcggcggaggggatagatgtgagccgtgccgaagcgaggataaccgacggcgggcagctttccatcagcagccgcttccaaaccgagctgcccgaccagctccaacaggcgttgcgccggggcgtgccgctcaactttaccttaagctggcagctttccgccccgataatcgcttcttatcggtttaaattggggcaactgattggcgatgacgacaatattgactacaaactgagtttccatccgctgaccaaccgctaccgcgttaccgtcggcgcgttttcgacagactacgacaccttggatgcggcattgcgcgcgaccggcgcggttgccaactggaaagtcctgaacaaaggcgcgctgtccggtgcggaagcaggggaaaccaaggcggaaatccgcctgacgctgtccacttcaaaactgcccaagccttttcaaatcaatgcattgacttctcaaaactggcatttggattcgggttggaaacctctaaacatcatcgggaacaaataatgcgccgttttctaccgatcgcagccatatgcgccgtcgtcctgttgtacggactgacggcggcaaccggcagcaccagttcgctggcggattatttctggtggattgttgcgttcagcgcaatgctgctgctggtgttgtccgccgttttggcacgttatgtcatattgctgttgaaagacaggcgcgacggcgtattcggttcgcagattgccaaacgcctttctgggatgtttacgctggttgccgtactgcccggcgtgtttctgttcggcgtttccgcacagttcatcaacggcacgattaattcgtggttcggcaacgatacccacgaggcgcttgaacgcagcctcaatttgagcaagtccgcattgaatttggcggcagacaacgccctcggcaacgccgtccccgtgcagatagacctcatcggcgcggcttccctgcccggggatatgggcagggtgctggaacattacgccggcagcggttttgcccagcttgccctgtacaatgccgcaagcggcaaaatcgaaaaaagcatcaacccgcacaagctcgatcagccgtttccaggtaaggcgcgttgggaaaaaatccaacgggcgggttcggtcagggatttggaaagcataggcggcgtattgtacgcgcagggctggctgtcggcgggtacgcacaacgggcgcgattacgccttgtttttccgtcagccggttcccaaaggcgtggcagaggatgccgtcttaatcgaaaaggcaagggcgaaatatgctgagttgagttacagcaaaaaaggtttgcagacctttttcctggcaaccctgctgattgcctcgctgctgtcgatttttcttgcactggtcatggcactgtatttcgcccgccgtttcgtcgaacccgtcctatcgcttgccgagggggcgaaggcggtggcgcaaggcgatttcagccagacgcgccccgtgttgcgcaacgacgagttcggacgcttgaccaagttgttcaaccacatgaccgagcagctttccatcgccaaagaagcagacgagcgcaaccgccggcgcgaggaagccgccaggcattatcttgaatgcgtgttggaggggctgaccacgggcgtggtggtgtttgacgaacaaggctgtctgaaaaccttcaacaaagcggcggaacagattttggggatgccgcttacccccctgtggggcagcagccggcacggttggcacggcgtttcggcgcagcagtccctgcttgccgaagtgtttgccgccatcggcgcggcggcaggtacggacaaaccggtccatgtgaaatatgccgcgccggacgatgccaaaatcctgctgggcaaggcaaccgtcctgcccgaagacaacggcaacggcgtggtaatggtgattgacgacatcaccgttttgatacacgcgcaaaaagaagccgcgtggggcgaagtggcgaagcggctggcacacgaaatccgcaatccgctcacgcccatccagctttccgccgaacggctggcgtggaaattgggcgggaagctggatgagcaggatgcgcaaatcctgacgcgttcgaccgacaccatcgtcaaacaggtggcggcattgaaggaaatggtcgaagcattccgcaattatgcgcgttccccttcgctcaaattggaaaatcaggatttgaacgccttaatcggcgatgtgttggcattgtatgaagccggtccgtgccggtttgcggcggagcttgccggcgaaccgctgacggtggcggcggatacgaccgccatgcggcaggtgctgcacaatattttcaaaaatgccgccgaagcggcggaagaagccgatgtgcccgaagtcagggtaaaatcggaaacagggcaggacggtcggattgtcctgacggtttgcgacaacggcaaagggttcggcagggaaatgctgcacaacgccttcgagccgtatgtaacggacaaaccggcgggaacgggattgggtctgcctgtggtgaaaaaaatcattgaagaacacggcggccgcatcagcctgagcaatcaggatgcgggtggcgcgtgtgtcagaatcatcttgccaaaaacggtaaaaacttatgcgtagcagcgatattttaattgtagacgacgaaatcggcatccgcgacctgctgtcggaaatcctgcaggacgaaggttattcggtcgcattggcggaaaacgccgaagaggcgcgcaagctgcgccatcaggcgcgccccgcgatggtgctgctggatatttggatgcctgattgcgacggcatcacccttttgaaggagtgggcgaaaaacgggcagctcaatatgccggtggtgatgatgagcgggcatgccagcatcgataccgccgtggaagccaccaaaatcggcgcgatcgattttttggaaaaaccgatttccctgcaaaagctgctgtctgccgtcgaaaacgcgttgaagtacggtgcggcgcaaaccgaaacggggcctgtattcgacaagctgggcaacagtgcggcgattcaggaaatgaaccgtgaggtaggggctgcggtgaaatgtgcctctcccgtacttttgacgggcgaggcgggttcgccgtttgaaacggtggcacgctatttccataaaaacggtacgccgtgggtcagcccggcaagggtcgaatatctgatcgatatgccgatggaactgttgcagaaggcggagggcggcgttttgtatgtcggcgacatcgcccagtacagccgcaacatccaagccggtattgcctttattgtcggaaaggcggaacaccgccgcgtcagggtggtcgcatcgggcagcagggcggcaggttcagacggcattgcctgcgaggaaaagctggcggaactgctgtcggaatcggtcgtccgtattccgccgctgcgtatgcagcatgaagacattcccttcctgatacaggggattgcctgcaatgtggcggaaagccaaaagattgcgcctgcctcattcagtgaagaggcacttgccgcattgacccgttacgactggccgggaaatttcgaccaactgcaaagcgtcgttgcaacgctgttgttggaggcggacggacaggaaatcggcgcaggggcggtttcttcccttttggggcagaatgtgcctgccgagggggcggaagatatggtgggcgggtttaatttcaacctgcccctgcgcgaattgagggaggaggtggagcggcgttatttcgagtaccacatcgcccaagaaggtcagaatatgagccaagtggcgcagaaagttggtttggaacgcacgcacctttaccgcaaactcaaacagctcggcatcggcgtttcgcgccgggcgggggaaaaaaccgaagaataggcccggacggccggtttaccggctgcgggcttttgttttcagacggcatttggtgcaaatgccgtctgaaatcgtaaggggacggattttatgacagaggacgaacgtttcgcgtggctgcaattggcgtttacgccctatatcggcgcggaaagtttcctgctgctgatgcgccgtttcggcagcgcgcaaaatgccctgtccgcaccggcggaacaggtggcggcactgatacggcacaaacaggcgcttgaggcttggcgcaatgcggaaaaacgcgctctggcgcggcaggcggcagaagcggcattggaatgggaaatgcgggacggatgccgcctgatgctgcttcaggatgaagattttcccgaaatgctgacgcaggggctgaccgcgccaccggttttgtttttgcgcggcaacgtgcaactgctgcacaaaccttccgccgccatcgtcggcagccgtcatgccacgccgcaggcgatgcggattgccaaagatttcggcaagtcgttgggtgggaaaggcattcccgttgtgtcgggtatggcttcgggcatcgataccgccgcccatcagggtgcgttgcaggcagaaggcggcaccatcgccgtgtgggggacgggcatagaccgcatttatccgccggtcaacaaaaaccttgcctatgaaatcgccgaaaaaggattgattgtcagcgagttccccatcggcacgcggccgtatgccggcaattttccgcgccgcaaccgcctgattgccgccctgtcgcaagtaacgctggtggttgaagccgcgttggaatccggttcgctgattactgccagattggcggcggagatggggcgcgaagtgatggcggtacccggctcgatagacaatccacacagtaaaggctgccacaaactgattaaagacggcgcaaaattggtggaatgcctggacgacatcctgaacgaatgcccggggctattgcaaaatacgggtgcttcatcatattctataaataagggaatacctgaaaagcgcatcactgccgttcagacggcatccgaccagctgtctctgcctgaaggcaaaatgccgtctgaaaagacggagaaccgacccgtcggcggcagtatcttggacaggatgggtttcgacccagttcatcccgacgtgcttgccggacagttggctatgcctgccgcagatttgtatgccgcactgttggaattggaattggacggcagcgttgccgcaatgcccggcggcagataccagcgtatccgaacttgaacgcactttatattaaggaacacgaatgaccgaagtcatcgcctacctcatcgaacatttccaagatttcgatacctgcccgccgcccgaagacttgggtatgctgcttgaagaagcgggtttcgatacgatggaaatcggcaacaccctgatgatgatggaagtattgctcaacagctccgaattttccgccgaacccgccgacagcggcgcattgcgcgtgtacagcaaagaagaaaccgacaacctgccgcaggaagtgatggggctgatgcagtatctgattgaagaaaaagccgtcagctgcgaacagcgggaaatcatcatccacgcgctcatgcacattccgggcgacgaaattaccgtagataccgccaaagtgctgaccctgctgcttttatgggcaaacaagagcgagctgcccgtgttggtcggcgacgagctgatgagcgcgcttttactcgacaacaaacccacgatgaactgaagcggcttcagacggcccgcccgagtccgtctgaaacgtcggcatcaaaaccaccatccagagaacgacaaatggcgaaaaacctattaatcgtcgaatccccgtccaaagccaaaaccctgaaaaaatatttgggcggcgattttgaaatccttgcatcctacggacacgtccgcgacctcgtccccaaaagcggcgcggtcgatcccgacaacggctttgcgatgaaataccaactcatcagccgcaacggcaaacacgtcgatgccatcgtcgccggtgccaaagaagctgaaaacatctacctcgccaccgacccggatagggaaggcgaagccatttcctggcatcttttggaaatcctcaaatccaaacgcggcttgaaaaacatcaagccgcagcgtgtcgtgttccacgaaatcaccaaaaacgccgtgctcgatgccgttgcccatccgcgcgaaatcgaaatggacttggtcgatgcgcaacaagcccgtcgcgctttggactatttggtcggtttcaacctttcgccattgttgtggaaaaaaatccgtcgcggtttgagcgcgggccgtgtacaaagccccgcactgcgtttgatttgcgaacgcgaaaacgaaatccgcgcgtttgaagcgcaggaatattggacggtacatctagacagccacaaaggccgcagcaagttcaccgccaaactcgcccaatacaacggcgcgaaactcgaacaattcgacctgccgaacgaagccgctcaagccgatgtgttgaaagaactcgaaggcaaagaggccgtcgttaccgccatcgaaaagaaaaagcgcagccgcaaccccgccgcgccgtttaccacatccaccatgcagcaggatgctgtgcgcaaactcggcttcaccaccgaccgcaccatgcgtaccgcccagcagctttacgaaggtattgacgtagggcagggtgccatcggtctgattacctatatgcgtaccgacagcgtgaacttggcggatgaagccttaaccgaaatccgccattacattgaaaacaaaatcggcaaagaatatctgccgagtgccgccaaacaatacaaaaccaaatccaaaaacgcccaagaagcgcacgaagccatccgcccgacttccgtgtaccgcacgcccgaaagcgtcaaacccttcctgagcgccgaccagttcaaactctatcaaatgatttggcagcgtaccgtcgcctgtcagatgacgcccgccaaattcgaccaaaccaccgtcgatattaccgtcggcaaaggcgtattccgcgtaaccggacaagtgcaaaccttcgcaggcttcctcagcgtttacgaagaaagcagcgacgatgaagaaggcgaagacagcaaaaaactgcccgaaatgagcgaaggcgacaaattgcccgtggacaaactctacggcgaacaacactttaccactccgccgccacgctacaacgaagccacgctggttaaagccctcgaagaatacggcatcggccgcccctcgacctacgccagcatcatctccacgctcaaagaccgcgaatacgttacccttgagcaaaaacgctttatgcccaccgacacaggcgacatcgtcaataaattcctgaccgaacacttcgcccaatacgtcgattaccacttcactgccaaactcgaagaccagcttgacgaaattgccgacggcaaacgccaatggattcccttgatggacaaattctggaaaccgttcatcaaacaagtggaagaaaaagaaggcatcgaacgcgccaaatttaccacgcaggaacttgatgaaacctgcccgaaatgcggcgaacacaaactgcaaatcaaattcggcaaaatgggtcgttttgttgcgtgtgccggttatcccgagtgcagctacacgcgcaatgtcaacgaaaccgccgaagaagctgccgaacgcatcgccaaagccgaagccgaacaggccgaactcgacggacgcgagtgcccgaaatgtggcggtcgcctagtgtacaaatacagccgcaccggcagcaaattcatcggctgcgtcaactatccgaaatgcaaacacgtcgagccgctggaaaaaccgaaagataccggcgtccagtgtccgcaatgcaaaaaaggcaacctcgtcgagcgcaaatcccgctacggcaaactgttttacagttgcagcacctatcccgactgcaactacgccacttggaacccgcccgttgccgaagaatgcctgaactgccattggccggtcttgaccatcaaaaccactaaacgctggggtgtagaaaaagtctgcccacaaaaagaatgcggctggaaagaacagattgaaccgcccgcgccgaaggagtaagattaggttggtttgaaagagaaaaggtcgtctgaaaaattttcagacgacctttgcttttctgtgattggtttatttgaatccgcgtgttgttttaaagtccgataaaatccggttcatttcaggcgcaaacaaggcgatgtaatcgtaagatagaccgcgactggcactgggatggggaaagcagacgacttcgcaatcttcaaacgattggaatttgacattgaaacgtgtaccgtcaaattctttttgcaccgtctccagcggtttggtctgcttaccgaccaactgctcgaagcgtggcagtacattttggttgttcagaaaatccgccaacctgctgcccatgaagaggatgactttcggacgcagtttttcgatgtggtagagaaaattatcgatgtgctcgggttgtgtgaacttgtcgggattgtcgatagtgttgccctgtgtagcagcccagttggtttgaaccagggatttttcaaatgcaccgcccaatccattttcgtctaaggggtgtccccacatttcaaaccaattttttatcgtattgtcgtaacgccacttttttgcctgctctccgaaatagagggatttgtttgcaaatgtatggtcgattttgttttcagggagtttgtattcacctgctacataagcagcctcatcggctttactccaaccccattcatagccacaaatcattaagccatgtttgtcgttgtagcctttgaacaggctgttgctcaaattcaaatccttcatcatgaactcttccttttaaaatttaagagcgattgacttcaatgtttttagatggggtggaaaaatccttgtgtaggcaacataaattcaataaatttcttgataattcgaaacctactaatagcgcacctataaaagctttttcattacgttcagcatgacggtcacgtcgttcatattttttacgcttgctgttccctgttattacagctaagccaagtgatatggcgagaattgcccaaacaatagtacttaataacaattttccccatactatcaataaggaaagaaaaaaccttttagtattagatcgataggttataatccatgcccatgaaaatgcaataagagttatacataagatacaagctgacaggatttctttatttttaattaaataacttagagcgatgaggatgacaggtgtcaagaaaataatagttacatcccgatagctataaaagaaaactgccctattttgaatgtggagatgtgcacagaatccaatatagctaaggataatagttaatataataaaaaaagaccaccaagggtgaagagataggaattccatgttttccctttttttgtaaaaaggaaaaaatcttatctaatagttaattgcctaaccagccagaagaagtttaaaatctatcccaataattcaaccatctatacagaaagttcagcttatggaaacccacgaaaaaatccgcctgatgcgcgaattgaataaatggtcccaggaggatatggcggaaaagctggcgatgtcggcaggcgggtatgccaaaatcgaacggggcgaaacgcagttaaatatcccgcgtttggagcagttggctcagattttcaaaatcgatatgtgggacttgctcaaatcgggcggtggtgggatggtgtttcagattaatgaaggtgatagtggtggcgatattgcgttgtatgcgtcgggtgatgtttcgatgaaaatagaatttttaaaaatggagttgaaacactgcaaagaaatgttggaacaaaaagacaaagaaatcgagctgctccgcaagctgaccgaaaccgtttaaacagatatgccgtctgaaaaaagttttcagacggcatattctttgacaggtcttgtataataccgtttgaacttacaggtttttgattatggcggcaggcaaacataccaaacacagcaaccgggtacgcattatcggcgggcaatgccggggcaggaaattgagtttcacatccgccgacggactgcgtccgacacccgacagcgtgcgtgaaaagctgtttaactggctgggacaggatttgacgggtaaaacggttttggatctcttcggaggcagcggcgcactcggtatagaagccgcttcgcgcaacgccaaacgcgtgctgatttcggataacaaccgccaaaccgtgcagaccttgcagaaaaacagtcgcgaactgggtttggggcaggtgcaaatcgtcttttcagacggcatcgcatatttgaagaccgtatccgaacagtttgatgttgtctttctcgacccgccgtttgcatggcaggactggcaaatcctgttcgatgccttgaagccgtgcctgaacccccgggcattcgtctatctcgaggcgggtacgctgccgaatattcccgattggctgacggaatatagagaagggaaatcggggcagagtacatttgaattaagggttttccaagtggctgaataatatgcgctttgataatcatttccgagttgtaaacattcgtttgcaaccgtccggttcaaaaaaaccttgtgctataatccgcgcccgcccggttttgataatttagtggaaaaggaaaagaaatgtcgctttttattaccgacgagtgcatcaactgcgacgtatgcgaacccgaatgccccaatgatgccatttcccaaggcgaggaaatttacgaaatcaaccccaacctctgcacgcagtgcgtcggacactacgatgagccgcagtgccagcaggtttgcccggtggactgcatcctgattgacgaagaacatcccgaaacccatgacgagttgatggcgaaatacgaaaagattatccagtttaaataaattctttttaaaacatcaaattatgtctgttttgaaataaaatcaaaaaaaaacttgacggaaaagcaagccgctaataaactaacgttctcttttggagggattcccgagcggtcaaagggggcagactgtaaatctgttgcgaaagcttcgaaggttcgaatccttctccctccaccaaaattcttacttggggcagtagcgagtaatgcgggtgtagctcaatggtagagcagaagccttccaagcttacggtgagggttcgattcccttcacccgctccaaacaattaggcccatgtagctcaggggtagagcactcccttggtaagggagaggtcggcagttcaaatctgcccatgggcaccatctctcgattattcatttctttaaggcttagatatataggatattgccatggctaaggaaaaattcgaacgtagcaaaccgcacgtaaacgttggcaccatcggtcacgttgaccatggtaaaaccaccctgactgccgctttgactactattttggctaaaaaattcggcggtgctgcaaaagcttacgaccaaatcgacaacgcacccgaagaaaaagcacgcggtattaccattaacacctcgcacgtggaatacgaaaccgaaacccgccactacgcacacgtagactgcccggggcacgccgactacgttaaaaacatgattaccggcgccgcacaaatggacggtgcaatcctggtatgttccgcagccgacggccctatgccgcaaacccgcgaacacatcctgctggcccgccaagtaggcgtaccttacatcatcgtgttcatgaacaaatgcgacatggtcgacgatgccgagctgttggaactggttgaaatggaaatccgcgacctgctgtccagctacgacttccccggcgatgactgcccgattgtacaaggttccgcactgaaagccttggaaggcgatgccgcttacgaagaaaaaatcttcgaactggctgccgcattggacagctacatcccgactcccgagcgagccgtggacaaaccgttcctgctgcctatcgaagacgtgttctccatttccggccgcggtacagtagtaaccggccgtgtagagcgcggtatcatccacgttggtgacgagattgaaatcgtcggtctgaaagaaacccaaaaaaccacttgtaccggtgttgaaatgttccgcaaactgctggacgaaggtcaggcgggcgacaacgtaggcgtattgctgcgcggtaccaaacgtgaagacgtggaacgcggtcaggtattggctaaaccgggtactatcactcctcacaccaaattcaaagcagaagtatacgtactgagcaaagaagagggtggtcgtcacactccgttcttcgccaactaccgtccgcaattctacttccgtaccaccgacgtaaccggcgcggttactttggaagaaggtgtagaaatggtaatgccgggtgaaaacgtaaccatcaccgtagaactgattgcgcctatcgctatggaagaaggcctgcgctttgcgattcgcgaaggcggccgtaccgtgggtgccggcgtggtttcttctgttatcgcttaagtttagaggccaatagctcaattggtagagtatcggtctccaaaaccgagggttgggggttcgagaccctcttggcctgccaaataaaaaattaaccggccttgtgtcggttaatttttttgtatttgttatttagtaaactctcttgccatttacatggattgagaatagacagatgctatgatggataaataatatgacagaacatacgcctgaaaaaaagaacgttaaagtggatcaactggttgttcaagataaagaatctgcatctaattccggtaaggaagggttttttgcatatttctcaaattcttggtccgaattcaaaaaggtggtttggcctaagcgtgaagatgctgtcagaatgactgtatttgttatagtgtttgttgctgtgctttctatatttatctatgcggcagatacagcaatttcgtggttattttttgatgtattgctgagaagggaaggttgagatgtcgaaaaaatggtatgttgtacaggcgtattcggggtttgagaagaatgtccaacgaatattggaagagcgcattgcccgtgaggagatgggagattatttcggacaaattctggtgcctgtagagaaagttgttgatatccgcaatggtcgtaagactattagtgaaagaaagtcatatcctggttatgtgctagttgagatggaaatgacagatgactcttggcatcttgtaaaaagcaccccccgtgtttccggttttattggagggagggctaatagacctacgccgattagtcagagagaggctgaaattattttacagcaggttcagaccggcatagagaagccgaaaccaaaagttgaatttgaggtcggtcaacaggttcgtgtaaatgaagggccgtttgcggattttaacggggtggttgaggaggtcaattatgaacggaataagttacgcgtgtctgttcagatatttggtagagaaacacccgttgagctggagttcagccaggttgaaaagattaactgatttttatacttgaaaaaaaagcaataagaggatagaatcaaaaattaacttggggagcggaaatggttccgcgtcttacccgtttttaggagttcgttaagtggcaaagaaaattatcggctatattaaactgcaaattcctgcaggtaaagccaatccatctcctccggttggtcctgctttgggtcagcgcggtttgaatattatggaattttgtaaggcatttaatgctgcaacccaaggtatggagcctggcttaccgattccggttgtgattactgcatttgcagataaatcattcacatttgtgatgaaaaccccgccagcttctatcttgttgaaaaaggctgccggtttgcaaaaaggtagttctaatcctctgaccaacaaagtgggtaaattgacccgtgcccagttggaagaaattgctaaaactaaagatcctgatttgactgctgctgacttggatgcggctgtccgtactatagcaggttctgctcgctcaatgggcttggatgtggagggtgttgtataatggctaaagtatctaaacgcttgaaagctcttcgctcttctgtggaagccaataaattatatgcaattgatgaagcaattgctttggtaaaaaaagcagcgactgctaaatttgacgagtctgttgacgtatctttcaacttgggcgttgatccgcgtaaatctgaccaagttatccgtggttcggtcgttctgcctaaaggcaccggtaagataacccgtgtggctgtatttactcaaggtgcaaatgcagaagctgctaaagaagctggtgcagatatcgtcggtttcgaagatttggctgctgaaatcaaagcaggcaatctgaactttgatgtcgttattgcttctcccgatgcaatgcgtattgttggtcagttgggtactattttgggtcctcgaggcttgatgccaaaccctaaagtaggtacggttactcctaacgttgctgaagcagttaagaatgcaaaagcaggtcaagtacaataccgtacagataaagcaggtatcgttcatgcaacgattggtcgtgcttctttcgctgaagctgatttgaaagagaactttgatgcgttgctggatgctatcgttaaagccaagcctgctgccgctaaaggtcagtatctgaaaaaagttgctgtgtctagcaccatgggtttgggtattcgcgttgatacatcaagcgtaaataactaatcttaaggaattttcaagcagtttggttttctgggctgcttgaatttgggctacttaaaattaagtagatgtccaagaccgtagggatcgtaagatttaatcgtaactgccctacgcagacggtagtcctgaaacacattgcaagattgcttgtaagatgtctttttaggttaccgcgctggtgggatatcgttttggtatcctgtttataaacagtgggaggtagaccttgagtctcaatattgaaaccaagaaagtggcggtcgaggaaattagcgcggcaattgctaatgctcaaaccctcgtagtcgctgaatatcgcggtatcagtgtttccagtatgactgagcttcgtgcgaatgcacgtaaagaaggcgtttatttgcgcgttctgaaaaatactttggctcgtcgtgcagtgcaaggtacttcatttgcagaattggccgatcaaatggttggtccgttggtttacgctgcttctgaagatgctgttgctgctgctaaagtgttgcaccaattcgcgaaaaaagatgacaaaattgtcgttaaagccggttcttacaatggcgaagtaatgaatgctgctcaggttgctgagttggcttctattccgagccgcgaagagctgttgtccaaactgttgttcgttatgcaagctcctgtatcgggctttgcgcgcggtttggctgctttggcagagaaaaaagccggcgaagaagccgcttaatcgattttgtttctgttaatcaattattttttaatacaatatttggagtaaaatagcatggctattactaaagaagacattttggaagcagttggttctttgaccgtaatggaattgaacgacttggttaaagcttttgaagaaaaattcggtgtttctgctgctgctgttgcagttgcaggtcctgctggtgccggtgctgccgatgctgaagaaaaaaccgaatttgatgtcgttttggcttctgccggcgatcaaaaagtcggcgtgattaaagttgtccgtgcaattaccggtttgggtctgaaagaagctaaagacatcgttgacggcgcacctaaaaccattaaagagggtgtttctaaagctgaagccgaagacatccaaaaacaactggaagaagcaggcgctaaagtcgaaatcaaataatttgatgcttcttatgaaggctggcagttttctgccagccttattttgcttcttaaaataaacatcaagtattgtttacatttatttgcatagtttttatcaagtcattgcaaataaatgtaaatatcagattgatgcgtaccgttgtttcagacggcctattattgaaaattacttttcggagtgtgtatgaactattcgtttaccgagaaaaaacgtatccgtaagagttttgcaaagcgggaaaatgttttggaagttcctttcttgctagcaacccaaattgattcttatgcgaagtttttgcagctggaaaatgcttttgacaaacgtaccgatgacggtctgcaggcggcatttaattctattttcccgattgtgagccataacggttatgcgcgattggagtttgtgcattacacattgggcgagcctttgttcgatattcccgaatgtcagttgcgcggaatcacttatgcagcccccttgcgcgcgcgtatccgtttggtgattttggataaggaagcatctaaaccgacggtaaaagaagttcgtgaaaacgaagtgtatatgggcgaaattccgttgatgaccccgagcggttcttttgtgattaacggcacagagcgtgtgattgtctcccagttgcaccgttcgcccggcgtattcttcgagcatgacaaaggtaagacgcactcttccggcaaattgttattctccgcccgcatcattccctaccgtggttcatggttggattttgaatttgatccgaaagatttgctgtatttccgtatcgaccgccgccgtaaaatgccggtaacgattttgttgaaggctttaggctacaacaatgagcaaatcttggatattttctacgacaaagaaacgttctatttgtcttcaaacggtgttcaaaccgatttggttgcagaccgtctgaaaggcgaaactgccaaggtcgatatcttggataaagaaggcaatgtattggttgccaaaggtaagcgcattactgcgaaaaatatccgtgatattaccaatgcaggcctgacccgtttggatgtagaaccggaaagcctgctgggcaaagcattggctgccgatctgattgattcggaaaccggcgaggtattggcttctgccaatgatgaaattacagaagagttgttggccaaatttgatatcaacggcgtaaaagaaattacgaccctttatatcaatgagctggatcagggtgcttatatctccaataccttgcgtacggatgagactgccggccggcaggcggctcgtgttgcgatttaccgtatgatgcgtccgggcgaaccgcccaccgaagaggcggtcgagcaattgtttaaccgcttgttcttcagtgaagacagctacgatctgtcccgcgtaggccgtatgaaatttaatacgcgcacatacgaacaaaaactgtccgaagcccaacaaaactcttggtacggccgcctgctgaacgaaacgtttgccggtgctgccgacaaaggcggttatgtcctgagcgtcgaagatattgtcgcctcgattgcgactttggtcgagttgcgtaacggccatggcgaagtggacgatatcgatcacttgggcaaccgccgagtacgttcggtaggcgagctgactgaaaaccaattccgtagcggtttggcccgtgtggaacgtgccgtaaaagaacgtttgaatcaggcggaatcagaaaacttgatgccgcacgatttgattaatgcaaaacctgtttctgccgctattaaagaattcttcggctccagccaattgagtcagtttatggatcagaccaaccccttgtctgaagtaacccataaacgccgtgtatctgcattgggtccgggcggtttgacccgcgaacgtgcaggatttgaggtgcgggacgtgcatccgacccactacggtcgcgtatgtccgattgaaacgcctgaaggtccgaacatcggtttgatcaactcattgtccgtttatgcgcgcaccaatgattacggtttcttggaaacgccttaccgccgcgttatcgacggcaaagtaaccgaggaaatcgattacttgtctgccatcgaagaaggccgctatgtgattgcacaggcgaatgccgatttggattcagatggcaatctgattggcgatttggttacctgtcgtgaaaaaggcgaaaccattatggcaacgcccgaccgcgtccaatatatggacgtggcaactggtcaagtggtatccgttgcagcatccctgattccattcttggaacatgatgacgcgaaccgcgcattgatgggtgccaacatgcaacgtcaggcagtgccttgcttgcgtcctgaaaaaccgatggtcggtaccggtatcgagcgttccgttgccgttgactctgctactgcaatcgttgcccgccgaggcggcgtggtcgagtatgtcgatgccaaccgcgttgtgatccgtgtccatgacgacgaagcgactgccggtgaagtgggtgtcgatatttacaacttggttaaattcacccgttccaaccagtctaccaatatcaatcagcgtcctgccgtcaaagccggcgatgttttgcaacgcggcgatttggtggccgacggcgcgtccaccgattttggcgaattggctttgggtcaaaatatgaccatcgccttcatgccgtggaacggttacaactacgaagactcgattctgatttccgaaaaagtggctgcggacgaccgctatacttcgattcacattgaggaattgaatgtcgttgcccgcgatactaagctgggtgcggaagacattacccgcgatattccgaacttgtccgagcgtatgcaaaaccgtttggacgaatccggtatcgtttacatcggtgcggaagtagaagccggcgatgtgttggtaggcaaggtaacgcctaaaggcgaaacccaactgacgccggaagaaaaactgctgcgcgccatcttcggtgaaaaagcatctgacgtaaaagatacttcattgcgtatgcctaccggcatgagcggtaccgttatcgacgttcaagtcttcactcgtgaaggtattcaacgcgacaaacgtgctcaatccattatcgattccgaattgaaacgctaccgtttggatttgaacgaccaattgcgtattttcgacaacgacgcattcgaccgtatcgagcgtatgattgtcggtcagaaagccaacggtggtccgatgaagctggccaaaggcagcgaaatcacgaccgaatatctggcgggtctgccgagcaggcacgattggttcgatatccgtctgaccgatgaagatttggccaagcagttggaactgattaaagtgagcctgcaacaaaaacgcgaagaagcggacgagttatacgaaatcaagaagaaaaaactgacccaaggcgacgaattgcaacccggcgtacaaaaaatggtgaaagtttttatcgccatcaaacgccgtctgcaagccggcgacaaaatggcgggccgccacggtaacaaaggcgtggtatcgcgcattctgccagtggaagacatgccttacatggcggacggccgtccggtagacatcgtactgaacccattgggcgtaccttcccgtatgaacatcggtcagattttggaagttcacttgggttgggcagcaaaaggtatcggcgagcgtatcgaccgtatgctgaaagagcaacgcaaagcaggcgagttgcgcgagttcttgaacagactctacaacggcagcggtaagaaagaagatttggatgccctgactgatgaagaaatcatcgaactggcctccaacctgcgcaaaggtgcatctttcgcctctcctgtattcgacggtgcgaaagagtctgaaatccgcgaaatgctgaacttggcttatccgagcgacgatcctgaggttgaaaaactgggcttcaacgacagtaaaacccaaatcacgctgtatgacggccgttcaggcgaagcatttgaccgcaaggttacagtaggtgtgatgcactatctgaaactgcaccacttggttgacgaaaaaatgcacgcgcgttctaccggtccgtacagtctggttacccagcagcctttgggcggtaaagcccagttcggcggccaacgtttcggcgagatggaggtttgggcattggaagcatacggcgcggcatacacgctgcaagagatgctgactgtgaagtctgacgacgtgaacggccgtaccaaaatgtacgaaaacatcgtcaaaggcgaacacaaaatcgatgccggtatgcccgagtccttcaacgtattggtcaaagagattcgctcactgggcttggatatcgatttggaacgttactaaacaaaagttttcagacggcctttcagggtcgtctgaaaaagtggtttcagaataagaatgaagcaatcggcatttaggccgtctgaaatcaaaagtaccgtttcccaatatcgaaaatccgccatgcggtaaaaatacttccttcaaggagcaaaaatgaatttgttgaacttatttaatccgttgcaaactgccggcatggaagaagagtttgatgccattaaaatcggtattgcctctcccgaaaccatccgctcatggtcttatggcgaagtcaaaaaacctgaaaccatcaactaccgtacgttcaaacctgagcgtgacggtttgttctgtgccaaaatctttggcccggtcaaagactacgaatgcttgtgcggaaaatacaaacgcttgaaatttaaaggcgtaacgtgtgaaaaatgcggcgtggaagtaaccctgtccaaagtgcgccgcgaacgcatgggtcatatcgaattggctgcgcccgtcgcacatatttggttcttaaaatccctgccttcccgcttgggtatggtgttagacatgactttgcgcgacatcgagcgcgtattgtactttgaagcatttgtggtaaccgatcccggtatgactccgctgcaacgccgccaattgctgactgaagacgattactacaacaagctggacgaatacggcgacgatttcgatgccaaaatgggtgcggaaggtatccgcgaattgctgcgtaccctgaatgtagcgggcgaaatcgaaatcctgcgccaagagttggaatcgaccggttccgacaccaaaatcaaaaaaatcgccaaacgcttgaaagtattggaagccttccatcgttccggtatgaaactggaatggatgattatggatgtgctgccggtattgccgcctgatttgcgtccgttggttccattggatggtggtcgttttgccacttccgatttgaacgatttgtaccgccgcgttattaaccgtaacaaccgtctgaaacgtctgttggaactgcatgcgcctgacatcatcgtccgcaacgaaaaacgtatgttgcaagaagcagttgactcgctgttggataacggccgtcgcggtaaagccatgaccggcgccaacaaacgcccgctgaaatcattggcagacatgattaaaggtaaaggcggtcgcttccgtcaaaacctgttgggcaaacgtgtggactactccggccgttccgtgattaccgtaggcccgtacctgcgtctgcaccaatgcggtttgccgaaaaaaatggctttggaactgttcaaaccgttcattttccacaaattggaaaaacaaggtttggcctctaccgttaaagcagcgaaaaaattggtagagcaagaagtaccggaagtatgggacatcttggaagaagtcatccgcgaacatccgattatgctgaaccgtgcgccgaccctgcaccgtttgggtattcaagcgttcgaacctatcttgattgaaggtaaagcgattcagttgcacccattggtgtgtgctgcgttcaacgccgactttgacggcgaccaaatggcggtacacgttccattgagcttggaagcacaaatggaagcacgcacgctgatgctggcttcaaacaacgtattgtctccggccaacggcgaaccgattatcgtaccttcccaagacatcgtattgggcctgtactatatgactcgcgatcgtatcaatgccaaaggcgaaggcagcctgtttgccgatgtgaaagaagtgcatcgcgcataccataccaaacaggtcgagctgggtacgaaaatcaccgtacgtctgcgcgaatgggtgaaaaacgaagcaggtgagtttgagcctgtcgttaaccgttacgaaacaaccgtcggccgtgcattgttgagcgaaatcctgccgaaaggcctgccgtttgaatatgtcaacaaagcgttgaagaaaaaagaaatttctaaactgattaacgcatcgttccgcctgtgcggcttgcgcgatacggttatctttgctgaccacctgatgtacaccggtttcggatttgcggcaaaaggcggtatttccattgccgttgacgatatggaaattccaaaagaaaaagcggccttgctggctgaagccaatgccgaggttaaagaaatcgaagaccaataccgtcaaggtttggttaccaacggcgaacgctacaacaaggtggtcgatatttggggtcgtgccggcgataagattgctaaagcgatgatggacaacttgtccaaacaaaaagttatcgaccgtgccggcaacgaagtcgatcaagagtcattcaactccatttatatgatggcggactccggtgcccgtggttctgcagctcagattaaacagttgtccggtatgcgtggcttgatggcaaaacctgacggctcgattattgaaacgccgattacctcaaacttccgtgaaggtctgaccgtattgcaatactttattgcgacccacggtgcgcgtaagggtttggcggataccgcattgaaaaccgcgaactccggttacctgactcgtcgtctggtagacgtaactcaagatttggtcgttgttgaagacgattgcggtacttcagacggctttgtcatgaaggcagtggtacaaggcggtgatgtgattgaagcattgcgcgatcgtattttgggtcgtgttaccgcgtctgacgttgtcgatccgtcaagtggcgaaaccttggttgaagccggtacgttgctgactgaaaaactggtggatatgatcgaccaatccggtgtcgatgaagtcaaagtccgtacgccgattacttgtaaaacccgtcacggcctgtgtgcacactgttacggtcgtgacttggcacgcggcaaactggttaacgccggtgaggcagtcggtgtgattgctgcacaatccattggcgaaccgggtacccagttgaccatgcgtacgttccacatcggtggtgcggcatcccgtgcggcagcagccagccaagtggaagccaaatccaacggtacggcacgattcagcagccagatgcgctacgttgccaacaacaaaggcgagttggttgtcatcggccgttcttgtgaagtcgtgattcacgacgatatcggccgtgaacgcgaacgccacaaagtaccttacggtgccatcctgctggtacaagacggtatggccattaaagccggtcaaaccttggcaacctgggatccgcatacccgtccgatgattaccgaacacgcaggtatggtgaaattcgaaaacgtggaagagggcgttaccgttgccaaacaaaccgatgatgtaaccggtttgtccactttggtggtgattgacggtaaacgtcgttcctctagtgcttccaaactgctgcgtccgactgtgaaactcttggacgaaaacggcgtggaaatctgtattcccggtacttctactccggtatccatggcattccccgttggtgcggtgattaccgtacgcgaaggtcaggaaatcggtaaaggcgacgtattggcgcgtattccgcaagcctcttccaaaacccgcgacattaccggcggcctgccgcgcgttgccgaattgtttgaagcacgcgtgccgaaagatgccggtatgttggcggaaattaccggtaccgtttccttcggcaaagagaccaaaggcaagcaacgtctgattgttactgacgtggacggtgtagcatacgagaccttgatttccaaagagaaacaaattctggtacacgacggtcaagtggtaaaccgcggtgaaaccatcgtggacggcgcggtcgatccgcacgatattctgcgtttgcaaggtatcgaagcactggcacgctacattgtccaagaggtgcaagaggtttaccgtctgcaaggtgtgaagatttctgataaacacatcgaagtcatcatccgtcaaatgttgcgccgtgtgaacattgcggatgccggcgaaaccgggttcattaccggagagcaggtcgaacgcggcgatgtgatggcggccaatgaaaaagctttggaagaaggcaaagaaccggcgcgttacgaaaacgtattgctgggtattaccaaagcttccctgtccaccgacagcttcatttctgccgcatcgttccaagaaacgacccgcgttctgaccgaagccgcgattatgggcaaacaagacgagttgcgtggtttgaaagaaaacgtcatcgtcggtcgcttgattcctgccggtaccggtttgacttaccaccgcagccgtcatcaacaatggcaagaggtggaacaggagactgccgaaacccaagtaacggatgaataatctttggtgcatccattcaataaaaaaccgcaagccttgagcttgcggtttttctttgtccgattaaggcaaaaacaagcgttttcgtcattttgaggcgtgtggattattccttaggtattttcgggccggagaccaacgaggtggcgggtgtcgtcggtacgtccggagaccaaaataactttgccagggatgttggtttcggcggtcaaaaaaagtagcgtcttaatgttttccatttaaacaaatgtcgtctgaaacttcagacggcatttcctttaagaaataaatatgaaacccagaaatctcttttttgcaggctgcctgctgacttcggcgacgtttgccgaggatatcggcgtacctgtcgaactgattaacgtcggtaatcggattgcgatgccgtctgaaggggaaagcctcgccctcctgccgtttgccgaggatgtaccgccggttcgcgatgcaatgccgtctgaagttcctaaaagcgcggcaggcggcgatgttcggggtgaccggatgagaatgccgattaacatcggatgagcgcggctttatggcataaaaaactgtcgtggaaaggatttacaccccaaataaatttccgttacaacaagatcaacagcaatatgcccgccttttattcgcgcagcggcaaggaacggtttgtcagtatagaaaaaacgtattgacagtattttcttcagtcgtccgactgattgtgagggatgtcggtaaatatttatcggcaaacaagaaaatcatctttcttcttgtcgttatgcttgactgtctgcttgcaataaaaatataattccactcttgccgacatggtgtcggcaagtatttaactcaacaggacgagaaaatatgccaactatcaaccaattagtacgcaaaggccgtcaaaagcccgtgtacgtaaacaaagtgcccgcactggaagcttgcccgcaaaaacgtggcgtgtgcacccgtgtatacacaactacccctaaaaaacctaactctgcattgcgtaaagtatgtaaagtccgcctgaccaacggttttgaagtcatttcatacatcggcggcgaaggtcacaacctgcaagagcacagtgtcgtattgattcgcggcggtcgtgtaaaagacttgccaggtgtgcgttaccacactgtacgcggttctttggatactgcaggtgttaaagaccgtaaacaagcccgttccaaatacggtgctaagcgtcctaaataattactgggacttaaataggcacgtcggccgcctaagctgaacaacggccgagtaagtgaatactcaattgggtattcatgggaatagacccgactgaatagattaaaggaaattaaaatgccaagacgtagagaagtccccaagcgcgacgtactgccagatcctaaattcggcagcgtcgagttgaccaaattcatgaacgtattgatgattgacggtaaaaaatccgttgccgagcgtatcgtttacggtgcgttggaacagattgagaaaaaaaccggcaaagtagcaatcgaagtatttaacgaagccattgcaaacgccaaacctatcgtggaagtgaaaagccgccgtgtaggtggtgcaaactaccaagttcctgttgaagttcgtccttcacgccgtttggctttggcaatgcgctgggttcgcgatgcggcccgcaaacgtggtgagaaatccatggacctgcgtttggcaggcgaattgattgatgcgtccgaaggccgtggcggtgcgttgaaaaaacgtgaagaagtacaccgtatggctgaagccaacaaagcattctctcacttccgtttctaattttgaaaggctaataaaatggctcgtaagaccccgatcagcctgtaccgtaacatcggtatttccgcccatattgacgcgggtaaaaccacgacgacagaacgtattttgttctataccggtttgacccacaagctgggcgaagtgcatgacggtgcggctactaccgactacatggaacaagagcaagagcgcggtattaccattacctccgctgccgttacttcctactggtccggtatggcgaaacaattccccgagcaccgcttcaacatcatcgacaccccgggacacgttgactttaccgtagaggtagagcgttctatgcgtgtattggacggcgcggtaatggtttactgcgcggtgggcggtgttcaaccccaatctgaaaccgtatggcggcaagccaacaaataccaagtgccgcgcttggcgtttgtcaataaaatggaccgtcagggtgccaacttcttccgtgttgtcgagcaaatgaaaacccgtttgcgcgcaaaccctgtacctatcgtcattccggttggtgcggaagacaacttcagcggtgtggttgatttgttgaaaatgaaatccatcatttggaatgaagtcgataaaggtacaacctttacctatggcgatattcctgccgaattggtcgaaactgccgaagaatggcgtcaaaatatgattgaagccgcagccgaagccagcgaagaactgatggacaaatacttaggcggcgacgagctgaccgaagaagaaatcgtaggcgcgttgcgtcaacgtactttggcaggcgaaattcagcctatgctgtgtggttctgcatttaaaaacaaaggtgttcaacgtatgttggacgcagttgtagaattgctgccagctcctaccgatattcctccggttcaaggtgtcaacccgaataccgaggaagccgacagccgtcaagccagcgatgaagagaaattctctgcattggcgttcaaaatgttgaacgacaaatacgtcggtcagctgacctttatccgcgtttactcaggcgtagtaaaatccggcgataccgtattgaactccgtaaaaggcactcgcgaacgtatcggtcgtttggtacaaatgactgccgcagaccgtactgaaatcgaagaagtacgcgccggcgacatcgcagccgctattggtctgaaagacgttactaccggtgaaaccttgtgtgcggaaagcgcgccgattatcttggaacgtatggaattccccgagccggtaatccatattgccgttgagccgaaaaccaaagccgaccaagagaaaatgggtatcgccctgaaccgcttggctaaagaagacccttctttccgtgtccgtacagacgaagaatccggtcaaaccattatttccggtatgggtgagctgcacttggaaattattgttgaccgtatgaaacgcgaattcggtgtggaagcaaatatcggtgcgcctcaagtggcttaccgtgaaactatccgcaaagccgttaaagccgaatacaaacatgcaaaacaatccggtggtaaaggtcaatacggtcacgttgtgattgaaatggaacctatggaaccgggtggtgaaggttacgagtttatcgatgaaattaaaggtggtgtgattcctcgcgaatttattccgtctgtcgataaaggtatccgcgatacgttgcctaacggtatcgttgccggctatcctgtagttgacgtacgtatccgtctggtattcggttcttaccatgatgtcgactcttcccaattggcatttgaattggctgcttctcaagcgtttaaagaaggtatgcgtcaagcatctcctgccctgcttgagccaatcatggcagttgaagtggaaaccccggaagaatacatgggcgacgtaatgggcgacttgaaccgccgtcgcggtgttgtattgggtatggatgatgacggtatcggcggtaaaaaagtccgtgccgaagtacctttggcagaaatgttcggttactcgaccgacctgcgttctgcaacccaaggccgcgctacttactctatggagttcaagaaatattctgaagctcctgcccacatagctgctgctgtaactgaagcccgtaaaggctaatcagaaaaggccgtctgaaactgaaaataaattttcagacggccattgttctttaatcgatctttatatgtaaaggaattagctcatggctaaggaaaaatttgaacgtagcaaaccgcacgtaaacgttggcaccatcggtcacgttgaccatggtaaaaccactctgactgctgctttgactactattttgtctaaaaaattcggtggcgctgcaaaagcttatgaccaaatcgacaacgctcctgaagaaaaagctcgtggtattaccattaatacctcacacgtagaatacgaaactgaaacccgtcactacgcacacgtagactgcccggggcacgccgactacgttaaaaacatgattaccggcgccgcacaaatggacggtgcaatcctggtatgttccgcagccgacggccctatgccgcaaacccgcgaacacatcctgctggcccgccaagtaggcgtaccttacatcatcgtgttcatgaacaaatgcgacatggtcgacgatgccgagctgttggaactggttgaaatggaaatccgcgacctgctgtccagctacgacttccccggcgatgactgcccgattgtacaaggttccgcactgaaagccttggaaggcgatgccgcttacgaagaaaaaatcttcgaactggctgccgcattggacagctacatcccgactcccgagcgagccgtggacaaaccgttcctgctgcctatcgaagacgtgttctccatttccggccgcggtacagtagtaaccggccgtgtagagcgcggtatcatccacgttggtgacgagattgaaatcgtcggtctgaaagaaacccaaaaaaccacttgtaccggtgttgaaatgttccgcaaactgctggacgaaggtcaggcgggcgacaacgtaggcgtattgctgcgcggtaccaaacgtgaagacgtggaacgcggtcaggtattggctaaaccgggtactatcactcctcacaccaaattcaaagcagaagtatacgtactgagcaaagaagagggtggtcgtcacactccgttcttcgccaactaccgtccgcaattctacttccgtaccaccgacgtaaccggcgcggttactttggaagaaggtgtggaaatggtaatgccgggtgaaaacgtaaccatcaccgtagaactgattgcgcctatcgctatggaagaaggcctgcgctttgcgattcgcgaaggcggccgtaccgtgggtgccggcgtggtttcttctgttatcgcttaattgaaggatattgataaatggcaaaccaaaaaatccgtatccgcctgaaagcttatgattacgccctgattgaccgttctgcacaagaaatcgttgaaactgcaaaacgtaccggtgcagttgtaaaaggcccgattcctttgccgaccaaaatcgagcgtttcaacattttgcgttctccgcacgtgaacaaaacttcccgtgagcaattggaaatccgcacccacttgcgcctgatggacatcgtggattggaccgataaaactaccgatgcgctgatgaagctggatttgccggccggtgttgatgtagaaatcaaagtccaataattcggactataaaaaatccccaagcaatcaatgcttggggattttttatgttatgccgagacctttgcaaaattccccaaaatcccctaaattcccaccaagacatttaggagcaccttcttccagcaaaccgcccaagccatgattgccaaacacatcgaccggttcccactattgaagttggaccgggtaattgattggcagccgatcgaacagtacctgaatcgtcaaagaacccgttaccttagagaccaccgcggccgtcccgcctatcccctgttgtccatgttcaaagccgtcctgctcggacaatggcacagcctctccgatcccgaactcgagcacagcctcatcacccgcatcgatttcaacctgttttgccgctttgacgaactgagcatccccgattacagtcatcaaccatattccggtttgtcggagaaagatgcatacgctgtgatgaccggataccgacccgttaaaagagtccgaccctatgccgtctgaaaattcaaaacgcttcagacggcatattgaagatatttctgatatttctgttgatatttctttgacttgtcagatataatgccgagcttggtacatttgtgccaagtttaactttgtctgaaagacaggccaatcgtagcctgtccctttactttaaaaggaaaataatcatgactttaggtctggttggacgcaaagttggtatgacccgcgtgttcgacgaacagggtgtttctgttccggtaaccgttttggatatgtctgccaaccgcgttacacaagtaaaatccaaagatactgacggctatactgccgttcaagttacctttggtcagaaaaaagccaatcgtgtcaacaaagccgaagccgggcactttgcaaaagcaggtgttgaagccggtcgcggtttgattgagtttgctttgactgaagaaaaactggctgaattgaaagctggtgacgaaatcaccgtttctatgtttgaagtcggtcaactggtcgatgtaaccggtacctctaaaggtaaaggtttctccggcacgattaaacgtcataacttcggtgcccaacgtacttcccacggtaactcccgttctcaccgtgttccaggctctatcggtatggcgcaagacccgggtcgcgtgttccccggtaaacgcatggccggccaatacggcaacaccaaagcaactgttcaaaaattggaagttgtccgtgttgacgcagaacgccaactgctgttggttaagggtgctgttccgggtgcggtcaacagcgatgttgtagttcgtcccagcgtgaaagtaggtgcgtaatggaattgaaagtaattgacgctaaaggacaagtttcaggcagtctgtctgtttctgatgctttgttcgcccgcgaatacaatgaagcgttggttcatcagctggtaaatgcctacttggcaaacgcccgctccggtaaccgcgctcaaaaaacccgtgccgaagtaaaacactcaaccaaaaaaccatggcgtcaaaaaggtaccggccgtgcccgttccggtatgacttcttctccgctgtggcgtaaaggtggtcgcgcgttcccgaacaaacccgacgaaaacttcactcaaaaagtaaaccgcaaaatgtaccgtgccggtatggcgactattctgtcccaattgactcgtgacgagcgtttgtttgcgattgaggcgttgactgccgaaactcctaaaaccaaagtttttgccgaacaagtgaaaaatctgggtctggagcaagtgttgtttgtaaccaaacagctcgacgagaatgtttacttggcttcacgcaacttgccaaacgtgttggttttggaagctcaacaagttgatccttacagcttgctgcgttacaaaaaagtaatcatcactaaagatgcagttgcacaattagaggagcaatgggtatgaatcaacaacgtttgactcaagtgattttggcacctatcgtttctgaaaaaagcaacgtattggctgaaaaacgtaaccaaatgacgtttaaagttttggcaaatgcaaccaaacctgaaattaaagcggctgttgagctgctgttcggcgttcaagttgcagacgttactactgttaccattaaaggtaaagttaaacgttttggtcgcactttaggtcgtcgcagcgatgttaaaaaggcttatgtaagcttggctgccggtcaagagttggatttggaagccgctgctgcagctgcagataaggaataaacaaaatggcaatcgttaaaatgaagccgacctctgcaggccgtcgcggcatggttcgcgtggtaacagaaggtttgtacaaaggtgcaccttatgcacctctgctggaaaagaaaaattctactgccggtcgtaacaacaatggtcatattactacccgtcataaaggtggtggtcataaacatcattaccgcgtcgtagattttaaacgtaacaaagacggtatccctgcaaaagtagagcgtatcgaatatgaccctaaccgtactgcatttatcgcactgttgtgctatgcagatggtgagcgtcgctacattattgctcctcgtggtattcaagccggtgcagtattggtttccggtgctgaagctgcgatcaaagtaggtaacactctgccgatccgcaatattcctgttggtacaactattcactgtatcgaaatgaaaccaggtaaaggtgcgcaaattgcacgttctgccggtgcttctgcggtattgctggctaaagaaggcgcgtacgctcaagtccgcctgcgctctggcgaagtccgtaaaatcaacgtagattgccgtgcaaccatcggtgaagtcggtaacgaagagcaaagcctgaaaaaaatcggtaaagccggtgccaatcgttggcgcggtattcgtccgactgtacgtggtgttgtcatgaaccctgtcgatcacccgcatggtggtggtgaaggccgtacgggcgaggcccgcgaaccggtcagcccatggggtactcctgctaaaggctaccgcactcgtaataacaaacgcacggataacatgattgttcgtcgccgttactcaaataaaggttaatttagtatggctcgttcattgaaaaaaggcccatatgtagacctgcatttgctgaaaaaagtagatgctgctcgcgcaagcaacgacaaacgcccgattaaaacctggtctcgtcgttctaccattctgcctgattttatcggtctgaccattgctgtgcacaacggccgcacccatgtgcctgtgtttatcagcgacaatatggttggtcataaattaggcgaattctcattgacccgtacctttaaaggccacttggccgataaaaaggctaaaaagaaataaggtgaatcatgagagtaaatgcacaacataaaaatgcccgtatctctgctcaaaaggctcgtttggtagctgatttgattcgtggtaaagacgttgcccaagctttgaatattttggctttcagtcctaaaaaaggtgccgagctgattaaaaaagtattggagtcagctattgctaatgccgagcacaataacggtgcggacattgatgaactgaaagtggtaactatctttgttgacaaaggcccaagcttgaaacgttttcaagctcgcgccaaaggtcgcggtaaccgcatcgaaaaacaaacttgtcatatcaatgtgacagtgggtaactaaggaaaagctatgggacaaaagattaaccctacaggctttcgcctggcggtaactaaagactgggcttcaaaatggtttgctaaaagcaccgacttttctactgttttgaagcaggatatcgatgttcgcaattatttgcgtcaaaaattggccaatgcttcggttggtcgagtggttattgaacgccctgcaaaatctgcacgcattaccattcactccgctcgtccgggtgtggttatcggtaaaaaaggtgaggatatcgaggttttgaaacgtgacttgcaagtcttgatgggtgtacctgttcatgtaaatattgaagagattcgccgtcctgagttggatgctcaaattattgctgacggtattgcccagcagttggaaaagcgcgttcaattccgtcgtgctatgaaacgagcaatgcaaaatgcaatgcgttctggtgctaaaggcattaagattatgacttcaggccgtctgaatggtgcggatattgcccgtagcgaatggtatcgtgaaggtcgcgtgccactgcatactttacgtgcaaatgtagattatgcaaccagcgaagcgcacaccacatatggtgtattgggtctgaaagtttgggtttatacggaaggcaatattaaatcttccaaacctgaacatgagagtaaacaaagaaaggcaggtagacgtaatgctgcagccaactagactgaaataccgtaagcaacaaaagggtcgcaataccggcatcgctactcgcggtaataaggtaagtttcggtgagttcggcttgaaagccgtaggtcgtggtcgtttgactgcccgtcaaatcgaagctgctcgtcgtgcaatgacccgtcatatcaaacgtggtggtcgtatttggattcgtgtattccctgataaaccgattactgaaaagcctattcaagttcgtatgggtggcggtaaaggtaacgtggaatattacattgccgaaattaaaccaggtaaagtgttgtatgaaatggatggcgttccagaggaactggctcgtgaagcattcgagttggctgctgccaaattgcctattcctacaacctttgtagtaagacaggtgggtcaataatgaaagcaaatgaattgaaagacaaatccgttgagcagttgaatgcagatttgttggacttgttgaaagctcagtttggcttacgtatgcaaaacgctaccggtcaattaggcaaaccaagtgaattgaaacgtgtacgtcgcgatattgctcgtattaaaaccgttttaactgaaaaaggtgctaagtaatgagcgaaactaaaaatgttcgtactttgcaaggcaaagtagtaagcgacaaaatggataaaaccgtaacagtattggttgagcgtaaagtaaaacatccgctgtatggtaagattattcgattatctactaaaatccatgcccatgatgaaaataatcaatatggaattggtgatgtggttgttatatcggaatcccgtccattgtcaaaaactaaatcttgggttgtcagtgagctggttgagaaagcacgttctatttaagaattaaagcaacgtgcttggaatgggaaacgaagtattgcagcaaatttaatttgcgtgtaaacttcgtttcctgtctttcagtttcttctggaagtttcttccctttcggggtccaagactggtttacttgaaccgcaaggtttcatttaataagcagcggctttgctgtaagttatctgaaagtggtaaattaagttggttaatttaaaggtaataacatgattcaaatgcagaccatcttagatgtggctgataactctggtgcgcgtcgcgtaatgtgtatcaaggtattgggcggatctaagcgtcgctacgcttctgttggcgatattattaaagtggcagttaaagatgcggctccgcgtggccgtgtcaaaaaaggcgatgtatataatgcggtagttgttcgtactgctaagggtgtacgtcgtcctgatggtgcgttaattaaattcgataacaatgccgccgtgttactgaataataaacttgaacctttgggtactcgtatctttggtccggtaacccgtgaattgcgtactgagcgatttatgaaaatcgtttcattggcacctgaagtattataaggaatggcacgatgaataaaatcattaaaggcgatagggttgtagtaattgctggtaaggataaaggtaagcagggtcaagtagttcgagtgttgggtgataaagttgttgttgagggcgttaatgttgtaaaacgccatcaaaaacctaatccaatgcgtggcattgagggcggtattattactaaagaaatgcctttggatatttctaatatcgcaatcctgaatccggaaactaataaagcggaccgtgttggtattaagctgattgaaaatgaaggcaaagttaaacgcgttcgtttcttcaaatcaaatggctctatcattggggcataaggagataacatggctcggttgagagagttttataaagagacagttgttcctgaattggttaaacaatttggttacaaatcagtaatggaagtcccgcgtattgaaaaaattaccttgaatatgggtgtgggtgaggctgttgctgataaaaaagttatggaacatgctgtttccgatttagagaaaattgccggtcaaaaaccggttgttactgttgcccgtaaatctatcgcaggttttaaaatccgtgataactatccggttggttgcaaagtaacattgcgtcgtgatcaaatgtttgaattcttggatcgtttgattactattgcattacctcgcgtacgtgacttccgtggtgtgagcggtaaatcatttgatggccgtggcaattacaatatgggtgttcgtgagcaaattatttttccggaaattgaatacgataaaattgatgctttgcgtggtttgaatattactattactactacagcaaaaaccgatgaggaagcgaaagctttattgtcattgtttaaatttccgttcaaaggataatcatggctaagaaagcacttattaatcgtgatctgaaacgtcaagctttggctaaaaaatatgcggctaaacgcgcggcaattaaagcggtaatcaatgattcgaatgcaactgaggaagagcgttttgaggctcgtttgaggtttcaatccattcctcgtaatgcggcacctgtgcgtcaacgtcgtcgttgtgctttgacaggtcgccctcgtggtactttccgtaaatttggtttgggtcgtattaaaatccgtgaaatcgccatgcgtggcgaaattccgggtgttgttaaagccagctggtaataggagtaattaagaatgagtatgcatgatcctatttccgatatgttgactcgtatccgcaatgcgcaacgtgctaataaagcagcggttgcaatgccttcttcaaaattaaagtgtgctattgcaaaggtattgaaagaagaaggatatattgaggacttcgcagtttcatctgacgtaaagtctatattggaaattcaattaaaatactatgcaggtcgtcctgtaattgaacaaatcaagcgtgtatctcgccccggtttgcgtatttataaagcgtctagtgagattccaagtgttatgaatggcttgggtattgctattgttagtacttctaaaggtgtaatgactgatcgtaaagcacgttctcaaggtgttggtggtgagttgttatgcattgtagcctagtggaggaaaagaaatgtcacgtgtcgcaaaaaacccagtgactgttcccgctggtgtagaagtaaaatttggagcagaggcattagttattaagggtaagaacggtgaattgtcttttcctttgcattctgatgtagccattgaatttaatgatggcaaattgacttttgttgcgaataacagcagtaaacaagcaaatgcaatgtctggtactgctcgcgcattagtcagcaatatggttaaaggtgtttcagaaggttttgagaaaagattgcaattgataggtgtgggttatcgtgctcaagcacaaggtaaaatcttgaatctgtctttgggtttttctcatccgatcgtatatgaaatgcctgaaggtgtctccgttcaaactcctagccaaacagagattgttttaaccggctcggataaacaagttgttggtcaagttgctgctgagattcgtgcgttccgtgctcctgagccttataaaggtaaaggtgttcgctatgtaggagaagtagtggtaatgaaagaagccaagaaaaaataattgaggttcactaatggataaacatacaacccgactccgtcgtgcacgcaaaacccgtgctcgtattgcggacttgaaaatggtaagattatgtgtgttccgaagcaataatcatatttatgctcaagtaattagtgctgaaggtgataaagtattggctcaagcctctacattggaagctgaggtgcgcggtagtctgaaatctggaagcaatgttgaagcagctgcaatagttggtaaacgtatcgctgaaaaagctaaagcagcaggtgtagaaaaggttgcttttgatcgttcaggtttccaatatcacggtcgtgtgaaggctttggctgaagctgctcgtgaaaatggtttaagcttctaaatatttggagactttcagatggcaaaacatgaaattgaagaacgcggtgacggtctgattgaaaagatggtcgctgttaatcgcgtaactaaagtagttaaaggtggccgtatcatggctttctcagcactgactgttgttggtgatggtgatggtcgcattggtatgggcaaaggtaaatcaaaagaagtaccagttgctgttcaaaaagcaatggatcaagctcgacgctctatgattaaagtacctttgaaaaacggtactattcatcatgaggttattggccgtcatggtgctactaaagtatttatgcagcctgctaaagagggtagtggcgtaaaagccggtggacctatgcgtttggtttttgatgctatgggcattcataatatctccgccaaagtgcacggatctactaacccatataatatcgtacgtgcaacattagatggtttgtctaagttgcatactcctgctgatatcgcagccaaacgtggcttgacagtggaagacattttgggagttaaccatggctgaacaaaaaaagattagggttacattggttaaaagcctgattggtacaattgaatctcatcgtgcatgtgcacgcggtttaggtttgcgtcgtcgcgagcatacggtagaggttttagatacccctgaaaaccgtggtatgattaataaaatcagctacttgttgaaagtggagtcttgatatgtttttgaatacaattcaacctgctgttggtgctacgcatgctggtcgtcgtgttggacgcggtattggtagtggtcttggcaaaacgggtggtcgtggtcataaaggtcaaaagagccggtctggtgggtttcataaggtgggtttcgagggtggtcaaatgcccttgcaacgacgcctccctaaaagaggttttaaatctttaacagcatcagctaatgcacagcttcgtttaagtgaactggaatcaattgctgttaatgagattgatattttggtcttaaagcaagcgggtctgattgcatctacagtctctaatgttaaagttattgcttctggtgaaatttctaaggcagttgctttgaagggtattaaagttaccaaaggtgcgagagctgctatcgaggctgttggtggtaagattgaaatgtaaggtttaatattgtggctaatcaacaaacgtcatcaggttcatccaaatttggagatcttaagaaacgtcttttgtttctatttggagcattgattgtttttcgaattggtgcccatatacccgtacctggagttgatgctgttgctttagctaaattatacgaaagcgctggaaacggcatcctgggaatattgaatatgttttccggtgggtcgttagagcgctttagtatatttgcaataggaattatgccatatatttcagcttctattattgtacagctcgcttctgaaattttgccatcattgaaggctttaaaaaaagaaggggaggctggtagaaaggtaattacgaaatatactaggtatggtactgttttgttagcaattcttcaaagtctaggtgttgcatctttcgtatttcagcaaggaattgttgtaacaagttcatttgagtttcatgtttccacggtagtttctttggtaacgggaaccatgtttcttatgtggcttggggagcaaattactgaaaggggtatcgggaacggtatttctttaatcattacggcaggtattgcttcaggtattccttcgggtattgcaaagctggttacactgacgaaccaaggttctatgagcatgcttacggcgttgtttattgtatttggtgccttattattaatttatttggttgtatactttgaaagtgcacagcggaagattcctattcattatgcaaaacgccagtttaatggtagggcgggtagtcaaaatacgcatatgcctttcaagttgaatatggctggtgttattcccccaatttttgcttccagtattattctatttccatctactcttttaggttggtttggttcggctgatacaaatagtgttttgcacaaaatagctggattgttacaacacggtcaattgctgtatatggctttatttgcagcgacagttattttcttttgttatttttatacggctttggtttttagccctaaagaaatggcagagaatttaaaaaagagtggtgcttttgttcctgggattagacctggtgagcagacctctaggtatttagaaaaagttgtattacgtttgacattgtttggagctctttatattacaactatttgtttaattccagagttcttaactacggttttaaatgtacctttttatttgggtggcacgtctttgttgattctagttgttgtaacgatggattttagtacacaaataaattcgtataggcttactcaacagtatgataagttaatgactcgttcagaaatgaaatcattttctcggaaatagaattatggcgaaagaagatactatccaaatgcaaggtgaaattcttgaaactttacctaatgcaacatttaaagtaaaacttgagaatgaccatattgtattgggtcatatttctgggaagatgcggatgcattacattcgtatttctccgggagataaggtcacagtagagctgacaccttatgatctaactagggctcgaatcgttttcagagcaagataaaccaataaaaggaaaataaaatgcgtgtacaaccatctgttaagaaaatttgccgaaattgcaagattattcgtcgaaatcgtgtagttcgtgtaatttgtactgatctccgtcacaaacagcgtcaaggttaatggaatatttcttttaatgtgattctgtgatatagtgacacactttgccctaaaaaggaaaaaatatggctcgtattgcaggggtaaatatccctaataacgcacacatcgtaattggtcttcaggctatttacggtattggtgctactcgtgctaaattgatttgtgaggctgcaaatattgcgcctgatactaaagcaaaagatttggacgagactcaattagatgctttgcgtgaccaagttgccaagtatgaagtagaaggtgatttgcgtcgtgaggtaactatgagtatcaagcgattgatggacatgggctgctatcgtggcttccgtcatcgtcgcggcttaccatgccgcggtcaacgcactcgtacaaatgcgcgtacccgcaaaggtccgcgtaaagcgattgctggtaagaaataaattttaaggaattttattaatggctaaagcaaacacagcttcacgtgtacgtaaaaaagtacgtaaaaccgtgagtgagggtattgtgcacgttcatgcatctttcaacaataccatcattacaatcactgaccgtcaaggcaatgcgttgtcttgggctacctctggcggcgctggttttaaaggttctcgtaaaagtacaccatttgcagcacaagttgcagcagaagcagctggtaaagttgcccaagagtatggcgttaaaaatttagaggttcgtattaaaggtccaggtccaggtcgtgaatcctctgtacgtgctttgaatgctcttggtttcaagattaccagcattactgacgttaccccgttgcctcataacggttgccgtccgcctaaaaaacgtcgtatttaatattggagtgatttgaaacatggcacgttatattggccctaaatgtaagttggcacgtcgcgaaggtacggatttgtttttgaagagtgcgcgccgctctttggattctaaatgtaaaattgattccgctcctggtcagcatggtgcaaaaaaaccgcgtttgtcagactatggtttgcagttgcgtgaaaaacaaaaaatccgccgtatttatggcgtattagaacgtcagttccgtcgttatttcgcagaagctgatcgtcgtaaaggttctaccggcgagttgctgttgcagttgctggaatctcgtttggataatgtcgtttatcgtatgggtttcggttctacccgagctgaagcaagacagcttgtttctcataaggcgatagttgtgaatggacaagttgtcaatattccttctttccaagtgaaagctggtgatgttgtctcagttcgtgaaaaagccaaaaaacaggtacgtattcaagaagcattgggtttggcaactcaaatcggcttgccgggttgggtttctgtagatgcggataaacttgagggtgtgttcaaaaacatgccggatcgctcggaattgaccggtgatattaatgaacagctggtggtagagttctactctaaataatgctagctcagtgagggacagttaaatgcagaatagcacaaccgaatttttgaaacctcgtcaaattgatgtaaatactttttctgcaactcgtgcaaaagtatctatgcagccatttgaacgtggtttcggtcataccttaggtaatgctttgcgccgtatcttactgtcatccatgaatggttttgctcctactgaagtagctattgccggtgtattacacgaatattctactgttgatggtattcaggaagatgttgttgacattttgctgaatattaaaggtattgtgtttaaactccatggtcgtagccaagttcaacttgtgttgaagaaatcaggttcaggtgtcgtatctgccggtgatattgagttgccgcatgatgtagaaattctgaatcctggtcatgtcatttgtcatttggctgataacggtcaaattgagatggaaattaaagtagagcaaggtcgtggttatcaatctgtttcaggtcgtcaggtagttcgtgatgagaaccgtcagattggtgcaatccagttggatgcgagcttttcgcccatcagccgtgttagctttgaggttgaacctgcacgtgtagagcagcggacggatcttgataagttggttttggatatcgaaaccgacggttctattgatcctgaggaagctgtacgcagtgcggcacgtattttgattgatcagatgtctatttttgctgatttgcagggtacgcctgtggaggaggttgaagaaaaagcacctcctatcgaccctgttcttttgcgtccggtggatgatctggaattgacagtacgttcagctaattgtttgaaagctgaggatatttattatattggcgatttgattcaacgcactgaaaccgagcttcttaaaacgccgaatttgggacgtaaatctttgaatgagattaaggaagtattggcatctaaaggtttgacactgggttctaagttggaagcatggccacctgtaggcttggaaaagccttaatgaagaattaaaggataattgatatgcgtcatcgtaatggcaatcgcaaattaaaccgtaccagcagtcatcgtgctgcaatgctgcgtaatatggcgaattcattattgactcacgaagctattgtaacaactctgcctaaggccaaggaattgcgccgtgtagtagagccgttgattacattgggtaaaaagccgtcattggcaaaccgccgtttggcatttgaccgtactcgcgaccgtgatgttgtagtaaaactgtttggcgatttgggtcctcgttttactgctcgtaacggtggttatgttcgggtgttgaaatacggattccgtaaaggtgataatgcacctctggcactggttgaattggttgacaaaccggctgctgagtaattttagtcatataacgccatctgccgaaaagcaggtggcgttatttttgcaatatctgataggtaatagggtattggctatcatgtttaaaatattaattgaatagctaaggtttgcgcggtaaacttacatcattaaaaaattctatgatggtttatataatgaatgctttcgatataaagtcgacaaagatggacgtattgtctatatctttgcatacgtcagacttgtttgatttggaagatgtgctggtcaaattgggcaagaagtttcaagagtctggtgttgttccatttgtgctggatgttcaagagtttgattatcccgagtctttggatcttgctgcattggtttcgttgttttcaaggcatggtatgcaaattttgggtctgaagcattctaatgaacgttgggctgctgcggctatgaagtatcatttgctgttttgtctgtctcattcggaaaatgttaaagaactgggtcaggttgaggtgcagaaaacggaggatggtcagaaagcaaggaaaacagtattgattacatcccctgtccgtaccggtcagcaggtttatgccgaagatggcgatttgattgttacgggggcggtcagccagggggcggaattgattgcggatggcaatatacatatttatgcgccgatgagggggcgtgctttggccggtgccaagggtgatacttctgcccgcatatttatccactccatgcaggcagaactggtttctgtggcgggtatttaccgtaattttgaacaggatttgccgaaccatctgcacaagcagccggtacagatattgttgcaggataaccgattggttatcagtgcaattggctcagagtaattgtttgatatttaaaaaggaaatattgtggcaaaaattattgtagtaacttcaggtaagggcggtgtcggtaaaacgactaccagtgccagtattgcgacaggtttggcattacgcggatataaaactgcggtaattgattttgatgtgggtttgcgtaacctcgacctcattatgggttgcgagcgtcgtgtcgtttatgacctgatcaatgtcattcagggggaggcgacgctcaaccaagctttgattaaagataaaaattgtgaaaacctgtttattttgccggcttcccagactcgggataaagacgctttgacacgcgagggcgtagaaaaagtgatgcaggagctgtccggcaagaaaatgggctttgagtatattatttgcgactctcctgccggtattgagcagggtgcattgatggcgttgtattttgctgatgaagccattgtaacgaccaatcctgaggtttccagtgtgcgtgactccgacaggattttgggaattttgcaaagcaaatcccataaggcagagcaaggcggttcggttaaagaacatctgttgattacgcgttattctcccgaacgtgtggcaaaaggcgaaatgctgtctgtacaggatatttgcgatattctgcatattcctttgctgggtgtgattcctgaatcccaaaacgtcttgcaggcatccaattccggagaaccggtcatccatcaggacagcgtggcggcttccgaggcatataaggacgttattgcccgtcttttgggcgagaaccgtgaaatgcgtttcttggaagctgagaaaaaaagcttcttcaaacgtctgtttggaggataaggtatgtcattaatcgaatttttattcggcagaaagcagaaaacggcaaccgttgcccgcgaccgccttcaaatcatcattgcccaagagcgcgcccaagaaggtcaggctccggattacctgccgactttacgtaaagagttgatggaagtcctgtccaaatatgtgaatgtttcattagacaatatccgtatttcccaagaaaagcaggatggtatggatgtgcttgagttgaacattactttgccggaacagaaaaaggtataggacatgaccttaaccgaattgcggtacatcgtcgcagtcgcccaagaacgtcatttcggcagggcggcgcggcgttgttttgtcagccagcccactttgtctattgccattaagaaattggaagaagagcttgccgtctctttgtttgaccggagcagtaacgatattattacgaccgaggcgggggaacgtatcgttgcacaggcgcgtaaggtattggaagaggcggagcttatcaggcatttggcaaatgaagaacaaaacgagctggagggtgcgttcaaactcgggctgatttttacggttgcgccgtacctgctgccgaaactgattgtttcgttgcgccgtactgcaccgaaaatgcctttgatgttggaagagaattacacgcatactttgaccgagtcgctcaaacgcggggacgttgatgcgattatcgttgccgaaccgtttcaagagccgggcattgttaccgaacccttgtatgacgaaccgtttttcgtgattgtcccgaaagggcattcatttgaggaactggatgccgtttcgccccggatgctgggtgaggagcaggttttgctgctgacggaaggcaactgtatgcgggatcaggtactctcaagctgttccgaattggcggcgaaacaacgtatacaggggttgaccaatacattgcagggcagctcgattaatacaatccgccatatggttgccagcggtttggcaatcagcgtgttgccggcaaccgcactgaccgaaaacgatcatatgctgttcagcattattccgtttgagggtacgccgccaagccggcgggtcgtattggcgtaccgccgcaattttgtccgtccgaaggcgttgtcggcgatgaaggcggcgattatgcagtcgcagcttcacggggtaagttttatctgcgactaggcgcaggcattgttttcaaaacgccatttccctgagccgacaacacggtatgccaagatattgccgtcatcatcgattttgagtatagcatcgccacggaaactgccgtcctgaagatattcgacttttgcatcactgtgaatgttttcatcagtgccgatgcaatgccatgtatagtggattaacaaaaaccagtacggcgttgcctcgccttgccgtactatttgtactgtctgcggcttcgtcgccttgtcctgatttttgttaatccactataaaagaggccgtctgaaaaacatttttcagacggccttgtttattcaatcaaatcagtctttcaacttcgccaactgattttgaacttttgccattttgtcttccaattccgccaaatcggctttgtctttttccaccagatgcgcaggggctttttcggtgtagccgggtttggagagtttggcgttgagtttgtccaaggctttttgcagcttctcggcttctttgctcaaacgggcggtttcggcggctttgtcgatttcgactttcaacatcaggcgcgcgccgttgcagacggcgacgggcgcgtcttcgctttcgggtagggcggcgacttgctgtgcttcggtcaggcgggtcatcatcggcaggtatttgaggtagtccgccaagtcgtccgtgctttcgacaaacagcggggcttttacgttgggctggatgcccatttcgccgcgcaggttgcggactgcgccaatcaaatcctgcaacacggtcatttgctcgaatgccgtctgaacaatctcgccgctgtcggcttcggggaagcgggcgagcatgatgctgtcggcggttttcgcgtcgcacataggagcgacggtttgccacagttcttcggtgatgaacgggataatcgggtgcagcaggcgcagggcggcttcgagtacgcgcaataaggtatggcgtgtggcgcgttggcggctggcgcagccggtttgaagctgcactttggcgagttccaaataccagtcgcaatagtcgttccatacgaagctgtacagggtttccgccgccaaatcaaagcggtaggtttcgtaggcttgcgtaacctgttcgatggtctgattcagacggcctacaatccacatatcggggaaggagtagccgcgcggttcggcagcggttgcgccgtaaccgcagtcttggttttcggtgttcatcaagacgaagttggtggcgttccagattttgttgcagaagttgcggtagccttcggcgcgtttgaagtcgaagttgaccgaacgccccaagctggcgtagctcgccatagtgaagcgcaaagcgtccgcgcccatactcggaatgccttcggggaagagttttttcgtggcttcttccactttcggcgcggtttcgggtttgcgcaggccggtggtgcgttttaccagcagtttttccaagccgatgccgtcgatcaaatccacagggtcaatgacgttgccttcggatttggacatttttttgccttcgtggtcgcgcacgatgccgtggatgtacacgtctttaaacggtactttgccggtgaagtgggtggtcatcataatcatacgcgccacccagaagaagatgatttcgtagccggttactaagacattggacggcaggaaggctttgagttcgtcggtttcagacggccagccgagtgtggagaacggcacaagcgcggaggagaaccatgtatccaatacgtcttcttcgcgagtcaagcctgttttgccggcttgtttttcggcttcttcctgattgcgggcaacatacacattgccttcgttgtcgtaccatgcagggatttgatggccccaccacagttggcgtgagatacaccagtcttggatgttgttcatccattggttgtaagtgttgacccagttttcagggataaagcgtaccgcgccgctatcaacggcttttttggctttatcggcgaggctcaagcctttgaactcgctgtccggctcgccgccgtttggggtggcggacatggcgacaaaccattggctggtcagcataggttcaatcaccgaacctgtacggtcgcctttcggcgtcatcagcgtgtgtggtttgatttcgaccaagaaaccttgttcctgcaaatcggcaaccatttgtttgcgcgcggcaaagcggtctaagcctgcgtatttttcaggcagggcaaagcctagttgcgcttcgcctttgaagttgaacacttcggcgtttgccagcactttggcttccaagttgaacacattaatcaggcgcgtgtcgtggcgtttgccgacttcgtagtcgttgaagtcgtgtgcaggcgtgattttcacgcagcctgtgccgaagtctttttcaacgtattcgtcggcaatcacggggatagtacggccggtcagcggcaggattaattccttgccgattaagtgggtataacgttcgtcttcaggattgacggcaacggcaacgtcgcccagcagcgtttcaggacgggtggtcgccacgataacggcttcggcgggattgtccgccagcggatagcggatgtgccacatagagccttgttcttccacgctttccacttccaaatccgataccgccgtgccaagcacgggatcccagttcaccaagcgtttgccgcggtaaatcaagccttgctcatacaggcgcacgaacacttcggttacggtttcggcgcgcacgtcgtccatcgtgaaatactcgcgcgtccagtcggcagagcagcccacgcggcgcatttgttgggtaatcgtgccgccggaaacttctttccattcccacactttctccaaaaatttttcgcgacccaagtcatggcgggacacgttttgcgcagcaagctgacgctcaaccacaatctgcgtggcgatgcccgcgtggtctgtgccgggaatccaggcggtgttgcagcctttcatgcggtagtagcgggtcagaccgtccataatggtttggttgaaggcatgacccatgtgcagcgtgccggttacgttgggcggcggcagttggatggagaaagacggtttcgtcaaatccatatcaggttggaaatagccctgctcttcccagttttgataatgtttggattcgatttcggctggattgtatttgtctaacatgatggaactttgtgaaattaaggttatttttgatgtgcggattataacgcaaaaaggccgtctgaatcatttcagacggcctttggcatacaggttttaaaaatggaacaataccaggctgacggcaatcaccgccatacccgttgtcaggccgtaaacggtttcatggccgtctgaatagcgtttggcagccggcagcagctcgtccaacgccaaaaacaccatcacaccggctatcacgccgaataccgaaccaaacacggcaggcgacaaaaacggctgcaaaaccaaatagcccaaagccgcccccaacggctcggccaagccggatagcagacacgcccacaccgttttcttacggctgcgggtggcaaaataaaccggcgcggcgatggaaatgccctccggaatattatggatggcaatcgccaaggccaaaggcatcccgactgctggattttccaatgtggcaaaaaacgtcgccaagccttcggggaaattgtgcgcagtaatcgcaaacgccgccatcatgccgactcgcgcgatatggcggcgtttgctttcttgaaacgacgggtcttgcgcgtctaaagtttcatgcgggttcggcaccagacggtcaatcagcgcaatgccgcccatcccggccaaaaatgccatggtcgccgccgcaaacgcgtggtctttatcataaatttcagcgaacgcctcgctggacttactgaaaatctccgtcagggaaacatataccatcgcaccgccggcaaacgccaaaccaaacgacaacacacgcggattgggcgttttggaaaacatcaccaagccactgcctaatacggtaaacaaaccggcagccaatgtgatggaaaaggcaacggccaaattggacatcgaaaaatcgggcatgagaaaacctgcgctaaaagctgggacaggttcagactaacactttttaatgtatatgataatagttattatttattttattgattggatacacggattttgaaacaaaaggccgtctgaaaaatgattttcagacggcctttaaatttgaaatgccgctaaaccttagtgctttccagcttaagcctgataacgcgacaggctcaaatcgtcgctgcggatttcggtgtctttgccgctcacgatatcggcggttaattttgccgaacccagcgacatggtccagcctaaagtaccgtggccggtattcagaaacaggttgtcaaagcgggtgcgaccgattaacggcgtgctgtcgggcgtcatcggtctgaggccgctccagaacgatgcttggctcaaatcgccgccttccgggaacaagtcgttgacgaccaaagccaaggtttcgcggcgtttttcgggcagtttgatttcgtagcccgacaattccgccataccgccgacgcggattctgttgtcaaagcgcgtgatggcgactttgtagctttcatctaaaacggtggacaccggtgcgccgtctgaattggtgaccggcagggtcaaggaatagcctttgacgggataaatgggcagattgagatccaactgcgccaaaaccgtcctgctgaagcaaccgagcgcgcagacaacggcatctgcttcaaaccgccctgtttcggtttcaacggttttgatgcgcagcccgttgtggtcgatgcggctgatgttttggttgaaatgaaaccgtacgcccttttcctgacacaatttgtataggttttcagtgaagaggcggcagtcgccggtcgcatctgcaggcaggtgcaggccgccggcaattttggcggtaacgcgtgccagcgcaggctcaaattctgcacattcttcgggtttcagacggcggtacggcacgccgtagcgttccaaaacggcaatgtcttgttttgccgcttcgacttctttggtttggcggaaaatctgcaacgtcccttttttgcgtccctcaaaattcatgccggtttgcgcttcaaaacggcggaacatttcacggctgtattcggaaatcctgaccatgcgctctttattggtttgatagtgcgctgccgtgcagttttgcagcatttgccacagccattcgatttgatacaggctgccgtcggggcgaaacagcaaaggcggatggcttttaaacagccatttcagcgctttggtcgggataccgggtgcagcccaaggcgtggtatagccgtaagaaagctggcctgcgttggcaaaactggtttccatcgccacaccctcggcgcggtcgatgaccgttacttcatgtccggcctctgccagataccacgcggaagacacgccggcaacacccgcacctaaaacaagcactttcatgtttctccctccggctttttcaaaacagacttaatatgccgtgccgtctgaatattcggattcagacggcctcggatattaatgcggcaattcgccgtttgtgattttttgtttgaagtcgcgcgtttcattgacgatgactttcgccatcaataaaagtgcaatcaggttgggcaatgccatcaagccgttgaatgtgtccgaagccagccacaccaaatcaaggctcaacacggtacccagcataacggaagaaacataacccacgcggtacaaaccggcaaatttctcgccgaaaacatacaccgcgcatttttcgccgtaatagcaccagcccaaaatggttgagtaggcaaagaaaatcaggccgatggtaacaatccagccgccgatgccgggcagcattttttggaatgtgacggttgtcagtgccgcgccgctcacttcaggtttgacaaactcgccgcccgcgccgagcagtcccattaccaacacgatgccggtaatcgagcaaacgacgatggtatccaaaaacgtaccggtcatagaaaccaaggcctgacggacgggatggtcggttttcgcggctgcggcggcaataggcgcagaacccatacccgcctcattggagaacacgccgcgcgccacgccgtagcggatgaccgtaccgatagcaccgcccgccactgcctgcgcgctgaacgcatcggagaaaatcagcttgacggcaggcatcagtgcatcggaattaatcgcgataatggaaagaccgcccaacacataaaacaccgccatagcaggcacgatgaaagaagcggctttggcgatgcctttaataccacctaaaacgacaacggcagtcagaacggtcaacgtaatgccggtataggcaggttcgataccgaagctggtttgcaccgcctgtgcaaccgagttggactgcaccgagctgccgataccgaaggaagcgaatgtgccgaacagcgcaaacgcgacggccatccatttccagtttttgcccaagcctttttcgatgtaatacatcgggccgccggacatttcgcctttggaattgttgacgcggtatttcaccgccaacacgccttcgccgtatttggtggccatgccgaaaatggcggtcatccacatccaaaataccgcgcccgggccgccggttaccaccgcagtcgccacgccggcgatgttacccgtgccgatggtggcggacagcgcggtcatcaacgccgcaaaatgggaaatatcgccttcgtggccttcgccgcttttatgcttctttggcggcataaacgcctgtttcagcgcataacccaacatcgtgaactgcaaaccttttaataaaacagtcagcaaaatacccgtgccgaccagcagcatcagcatcaaaggtccccaaacccagccgctgacggtttcaaaaaaggctttgggattgtctaaaaacacttgcatggctttctcctttgtctgttttatttttaaaacaccacttttgtagtgtccagtaatttcagcacagaatatccaataagacaatatgttcttttgaaaaatacttttggttttttcgccgaaaacaggacggttcaagttgcggaaattgtttgcaattctttaaaagcagcggcggaggtcacaatgaaatgtccgaatggggatgtggcgggcggcagaaatcatcaatgctgccgactgccatacttctgaaatctacaaaatgatgcatcgatcaaacaatataccgctttaaaaaaaccgatgccgtctgaaacgctttcggggtttcagacggcatcaaaagggtacggtcagcggatgatgccgcgcgccgattgtgcgaaaaagtctcggaatacggcaagctcggcttgggtttcggcgcggcggagaatgtctgccttggcttcttcaaacggaatgccgcgatggtagagggttttgtacacgtctttgacggcggaaatctgctctgcggtaaaaccgttgcggcgcatgccttcgctgttgagccccgccggttcggcgcggtagcccgatgccataaagtagggcggcacgtctttgtgtacgcctgcggcaaacgcggtcatggcgtagtcgccgatgcggcagaattggaaaaccagcgtgtagccgcccaaaacgacgtagtcgccgatggtaacgtgtccggcaagcgaggcgttgttggcgaaaatggtgtggttgccgatgacgcagtcgtgcgcgaggtggcagtacgccataatccagttgtcgtcgccgatacgggtttcgccgatgccggttaccgtacctaaattaaaggtggtgaattcgcggatggtgttgccgttgccgataatcagcttggtcggctcgtcgcggtattttttgtcctgcgggatttcgccgaggctggcaaattggaaaatgcggttgttttcgccgatgctggtgtggccgttgatgacggcgtgcggaccgatttcggtattcgcgccgatttggacgttggggccgataacggtgtacgcgccgactttgacgccggagtcgagttcggctttggggtcgatgacggcggtcgggtggatgagggtcatgtttttcctttcctgtcgtgttgccgcgaagatgcgcgacggcaacaggttgtctgaaaactttcagacgacctttttctgaacactcaaaccacgcgtttggcacacatgatgatggcttcgacggcaacttgcccgtccactttggcaacggcgttgaatttgccgatgccgcgccggctggtcagcagctcgacttcaaagacgagttggtcgccggggatgacttggcgtttgaaacgggcttcgtctatgccggcgaagaagaagaattcgttttctttgcgcccgccttcgctcaaaatcgccaacgtgccgcacgcctgcgccatcgcttcgatgatgagtacgccgggcatcacgggcaggtcggggaaatggccttggaactggggttcgtttatggtgacgtttttaatcgcggtcagggttttcatcggctcgaaggcggtgatgcggtcgagctggagaaacggatagcggtgggggatgagtttttggatgtctttggcttcgatggggagttgtacgtccatgtctgtcgtattccttgaataaagtcggtttggttatttgctgtcttgaccggcatctgaaagctgctgctccagtgttttgagccgtttgttcatttcgcttaagcggtggatgtaaacagcgttgcgcgcccattctttatgggtggacatcgggaagatgccggcgaggtgtttgccgctttcggtaatgctgtgggtgacggacgtgccgccgccgatggtggttttgtcggcgatttcgatgtgtccgaccgtaccgacgccgccgccgatgatgcagtagctgcctatggttacgctacctgagatgccggttttggcggcgatgacggtgtgcgaaccgattttgcagttgtgtccgatttggacttggttgtcgattttggtgccgttgccgacggtggtgtcgctcatcgcgccgcggtcgatgttggtgttcgagccgatttctacgtcgtcgcccagcgttaccgcgccggtttgcgggattttgaaccacgaatcgtcggcgaaggcgagtccgaaaccgtccgcgccgatgaccgcgccgctgtggatttcgacgcgtctgcccagtgtgcagccgtaataaacgacggcgttgggatgcaggacgacttcgtcgcccagtttgcaatcgtgttggacgacggcgtttgccaagatgcggcagccttcgccgagcacggtgtttgcgccgatgtagacgttcgcgccgatttcgcagctggtgggaacggtcgcgcccggttcgacgacggcggtcggatggatgccgccgcgcgctttgacgacgggtgaaaacaggcgggcgactttggcgaaatagagataggggtcgtcggcgacaatcaggttgcgcccttcaaatccgtctgccgctttggcggaaacgatgaccgcgcccgcgctgctgtcgtggacttcggctttgtatttcggattggcaaggaagctgatgtgttccgcctgcgcgtctgcgagcgggcgcacggcggtaacggaaatgtcctcgccgcgccattcgccgccgagccgcgcggtgatttgggacagggtgtaggtggccggaatcatggttttcctgttcggtatgccgtctgaaagggtcagcgggcgttcatttctttaatgacgctgtcggtaacgtcgtattgggtgttgacgtaaatcacgttctgcaaaatgacatcgtaaccttcctgtttggcgattttgacgatgacgcggttggcgttttgctggagggaggcaaactcttcgttgcggcggaggttgtagtcttcttcaaactgcgcctgttttttgcggaacgctgcgaccagcccgcgccatttttcttcggcttgcgccttttttgcgtttctgagtttgccttcggcaagctgcctttccaaatccagaccttcgcgttgcagtttttgcaattcgtcctgacgagcggaaaattcgctgtccagcgttttttgaatcttgcgcgcctgcttggattcgaggtagatgcgctcggtgttgataaagccgattttttggaaggtgtcggcgtgcgcgcctgcggtgcagcacaaaccgatcagagccgcggcaaacgcgcgggtcaaacgggtcatggtaaaactccttcgaatgttgccgcgaaatgccgtctgaagggcttcagacggcatttgcgggattagaacgtcgtgccgagttggaattggaagcgttggatttcgtcttccggttttttcttcagcgggtaggcgtagctgaatttcatcgggcctaaaggcgagagccaggtaaccgcgccgccggcggaatagcgcaattcgttggtaaaggtggatttatgggtattgccggcgccgtaaatgttttgaaccctgccgccggtcgcggaactgctgttgtcgtcgtaggttttgccgtcccacacgctgcctgcgtcggcaaacaggctcaggcggacggtgcgcgcgtctttcgcgccgggcatcgggaagagcagctcggcggagacgttggcttttttgttgccgccgtagctgattttttcgccgtattcgtcatagactttcggaccgagcgtgccgctttcgtatccgcgcaccgaacccaggccgccgccgtagaagttttcaaagaaggggatttctttggttctgccgtagccgcccgcaatgccgacttcgccgccgagcatcagcgtgaaggttttgctcagggggaagaaccaggtttggttgtgggtggcggagtagtattgcagtttgctgccaggcagggcgatttcggcgttcacgcccgtcaggtagccgcgcgtcggccataacgcgctgtcggttttgttgcgcccccagccgacggtacctttgtacagccagcctttgaagctgccgtctgtgccgtcggttttgccgtatttcttgataaagtcggcatagtgtttgggcgctttgttgtaggtgttgacggtcaggtgttctgccaccaaaccgaaattcacgcggtcgtattcggtaacaggcacgctcatgcggatgcctgcgcctgccgtggtggttttatattgtttgatgctggtcgatgctttgcgcgggtcgaaggcttttccgtaaacatcgtagcccaggctgaccccgtctgccgtgaagtacgggtcagtaaacgacagcgagccgttaagcgtggttttgctcctggaggcgcgcagtgcggccgacttgcccgtaccgaacaggttgtcttgggaaacgcctgcggacatgaccaacccggtatcttgaacccaacccgcgctcaaatccagggaaccggtggaacgttcggtcagactcatgttcaaatcgactttgtcgggcgtgccggcaagcgggacagcatcaaactggacattgtcgaagtagcccaaaagctcgacgcgctctttggaacgttgcagcttggaggtgtcgtaaggtgcggattccatttggcgtaattcacggcggacgacttcgtcgcgggttttgttgttgccggtgatgtgtatttcgttgacgtagattttccggcccggttcgatgtgcaggacgaaatcgacggttttggtttcagcgttcggcagcggctgtacgctgatttcgctgtatgcgtagcctgccgagcccatgcggttctgaatctcacccaaaacggcggtcatctgctggcgttcgtaccatttgccgggcttcatggtcagcagtttttccagttcggctttggggacttcgttggtgtcgccttcgatggagactttgccccaacggaaacgtccgccttcgtggacggtgattttgatggtctgcttggttttgtcttcgttggtttggatgtcggtatcgaggatacggaaatcgaagtagccgttattttggtagaagtcggttactttttccatatcttgggcaaatttctgctcgttgaattggttgcttcgtgtcagccatgtccaaatgccgccttcggtcagggacatttgccgcatcagtttgcggtcggaatagacttggttgccttcaaattcgatgtcggtgattttggcggatttgccctcgtcaatcgtgatgtcgatgtcgacgcggttgcgggcgagtttggttactttgggcgtgatttggatattgagtttgccgcgcccgaggtattcttctttcaggccggcgactgcctgattgagtgtcgcctgattaaagtattgcgactgcgccagcccgaacgattcgaggtttttcttaatggcgtcgttttgcagcatttttgcgccggtgatgttgagcgagccgatggtggggcgttcgataacggtcagcaggagctgcccgtccgcagtttcgacgcgtacgtcgtcaaagaaaccggtggcgtacaggcttttgatgatggcactgccgtgtgtgtcgttgtaggtgtcgccgactttgacgggcaggtagttgaatacggtactcggctcggtacgctgcaagccttcgacgcggatgtcttggatggtgaagtcggcaagtgccaaaggcgatatgcccaacatcatcagtgcggaagcaatctgtttcagtttcattgtcagttccttgtggtgcggaatgcggtttcagacggcattccgaaacgtaaaatctaaccgagcagccgggtaacgtcgttgaagaaggcgaccgccatcatcagcatcatgagggcgagcccgaagcgcaaaccgatgttttggacgcgttcgcccaaaggtttgccgcgtatccattcggcagtataaaacacgaggtgcccgccgtccaaaacagggacgggcagtaggttcagcacgccgaggctgatgctgaccagtgctaaaaattccaaataactttgcaagccgagttcggcggactgtccggcaatgtcggcaatggtcagcggcccggaaatatggctgacggaggcgttgccgctgattagtttgccgaaaaatttgagggttgtccacgagtgggaaacggttttttcccagcccatgccgaatgcgcggacaacagacggacggtagctgcggcggatttgcgcgtcccacgccctgtccggctgcggacggaggccgacgcgcccgatcagggtgtggtcggactgttcgacagtatcggggcggatgtcggcggtatgggtttgtccggcgcgttcgtagttcagggtgatttttttgccggggctttggcgggtcaggtttgcccattcttgccatgaggcgatgggtttgccgtcggcggcagtcagcctgtcgcccggtttcaggcctgctttttcggcggggctgcctttttccacgccgccggcaacggttgtgattttaaagggcatcagtccgatgtagccttggttttttgcgattttaccggcttccggcgtgcctgcggcatcgatggtgcggacggtttgcgcgcccgatgccgtctgaacgccgacggcgactttgccggcttcgaggttgaggacgatttcggtttgcgcgctgccccaatctgcaacgggtgtgccgttgacggattgtattttgtcgccgctttggaagccggcgcgggcggcaatggtgtcgggttcgactgtgccgacgtaggggcgcagttcggttacgccgaaggaaaagctcagtccgtacagcaaaaccgccagtgcgaggttggtcagtgggccggcggcgacgatggcgatgcgcttggcggggtgttgtttgtcaaaagcgtagggtaaatcggcttctgatacttcgccttcgcgcgtatcgaccattttgacgtaaccgcccaacggaatcggggcgaggcaccattcggtgtcgccgcgctttcgggtgaaaaacggtttgccgaagccgacggaaaagcgtacgactttgacgccgcacaatctggcaacgatgtagtgtccgaactcgtgcaggctgaccaaaatcaggatggcgaagataaaagctagaagggtgtgcaaatggttttcctttgataacggtgttcagatggcatcagcgcagtgtgccgataaatgctcgcgcttgtgcgcgtgtccgggcatcttgcgccaagagcccccctatatcgcctatgccgtctgaaaagtcttgtgcaagacagtgggcgacggttttggcaatgtcggtaaacttaatctgtccgtccaaaaaggcggcgacggcggcttcgttggcggcgttcaatacgcagggcgcggctccgcctgcgttcatggcttcataggcgagcctcaggcaggggaagcggtcaaagtcgggcttttggaaggtcagcgcggacaatgcgtcgaaatccaggtcgccgacacccgaatcgatgcgctcgggcaaacccaaacaataagcgatgggcgttcgcatatcgggattgcccagttgcgccagcacggagccgtcgcggtagcgcaccatgctgtgtatcacggattgcggatggatgacgacttcgagtttgtcgggcggacagttgaacagccaatgcgcttcaatcagctccaaacctttgttcatcatggtggcggaatcgacggagattttgcgtcccatacgccaattggggtgtttgaccgcttgggcgggcgtaatgcggtcgaacgtgtttaaatcggcggtcagaaacgggccgccggaagcggtcaggataatcgaagcgatgccgtgttcgttcagacggccggcgtaatcgcgcggcaaaacttggaaaacggcgttgtgttcgctgtcgacgggcagcactgccgcgccgtttgcacgggcggtttccataaacaacgcgccggaaaccaccagcgtttctttgtttgccagataaatggttttgcctttttgcgccgctgcgagcgcggaaggcagccccaccgccccgacgatggcgcacatgacaccgctgacttcgtcggcagaggcaacgtcaaccaatgcctgcgcgccgtgtaaaacctgagtcgccgtgccgtcgcgtttcaacagggcttcaagccgggcggcgtgttccgcatcggcaacgacggcatattcggggtggaacgtttgacattgagccgccaatttctcgacctgcttatgccctgccagcgcgaatacgcggaatttttcggggtggcgggagacaacgtccagcgtgctttcgcctatgctgccggtactgcctaatatggtcaggacttgtggtgtcataatggggataactttataccggatgccgtctgaagcgttttcagacggcatagaatcaatttaaaaccgacatcatcgctgcatagacgctgataacggcaatcaggctgtcggtacggtcgaacacgccgccgtgtccgggcagcagcttgctgctgtctttgatgcctgccgcgcgcttgagccagctttccaaaaggtcgccgcatacgctgacaacggtcagcaccaaaccgattaacacggtatcgaaccagcctgtatcgaatgccagccagccggcacttcgtacggcggtcatgtacactgccacgcaaaccgcgccgccgattgcaccttcccagcttttgccggggctgattgccggcgcgattttgtgtttgccgaacgccttgccgctgaaatacgcgcaaatatcggcaacccacaccaaacccatcacggcgagcagcggcagggcatcatcgggatgcgggcgcagggatacgagcgcgaaccaaaacggcatgaccagaagccagccgacggcataaacctgccaaccgccgttgagcctccatttgaatctcaaccataaaggcataacggcgagccaaaatgccaaaacaacataccaaaccaaattaggcagcatccagccgcccgcataggcaaccacgccgaaaaccaaggttgcggcgaggtaatggttggttttaattttgcacaaaccgcccatacgggcatattcccacaaggcaatcagggcaatcagtccgcaaaatgcagcccacaaccattgcggcgcgtaaaacagcatgcccagcatcagcggcagcagccacatggcggttattacccgttgtttcagcatattcagttcctttgctgttcgataggcagttgctcggaggtgcgtccgaaccgccgttcgcgtttttggaacgaagcgacggcatcgtccaaagccttgccgtcaaaatcgggccacaaaatatcggtgaaatacagttctgcatatgccatctgccagagcaggaaattgctgatgcgcgtttcgccgccggtgcggatgaacaaatccggttccggtgcatcgcccagcatcaagtgtttcgccagcgtgtcttccgtaatctcggatacgccttcggcaatcagtttgtttgccgcctgcaaaatatcccagcggccgccgtaatcggcggcaatgctcagggtcaggccggtattgtttgccgtcaacgcttccgcctcttcgatgccttgcagaatctgccggttgaagcgttcgcggctgcccaatatcttcaggcgcatattgttttcgtgcaggcggcgtacctgtttttgcaaagcctgtaaaaacagccccatcaggaacgaaacttcgtcttcggggcggcgccagttttcggttgaaaaggcaaacacggtcagatattgcacacccagtttggcgcaatgcttcaccatattttccaatgcgtccaaaccgcgtttgtgtcccattatgcgcgggaggaaacgttttttcgcccaacggccgttgccgtccataatcacggcgatatgcttgggaatggcggtgtgttccaaaacggcctgcgtgctgcttttcatgtctgcctttcgcggttcggcattcaaatgccgtctgaacgccgaaccgtgcaggttaaattgccatcaaatcttcttctttggcagtcaggagtttgtcggcttcggtaatgtatttgtcggtcagtttttgaaccgcttcttcgccgcgacgtgcctcgtcttcggaaatttctttgtctttgaggagttttttgatgtggtcgttggcatcgcggcgcacgttgcggatagagacgcggccttcttccgcttcgccgcgtacgactttaatcaggtctttgcggcgttcctcggtcagcatgggcatcggcacgcggatcaggtcgccgacagctgccgggttcagtcccaagtttgaatcgcggatggctttctcgactttggccgccatattgccctcaaacggtttcacgccgatggtgcgcgcgtccagaagcgttacgttggcaacttggctgacggggaccatgctgccccagtattcgacttccacttggtcgagcaggccggtatgcgcgcggccggtacgcactttcgccagattttctttcagtacttcgaccgaacgctgcatcttgccttcggctgttttttgaatatcgttgatcatattgttctttcggtgggataaggtgggcgggagaccgtctgaacgcgtttcaagccgttcagacggcataaagaccgttaaccgcgaatagtaccgttattcgggcataacgacaaggtaggcggattggggatgccgtctgaagcgacaggcgtttcagacggcatcgtgtccgaccgtcagccgtgttcccgtgtttcaagcaggctttggcgcaggtgttggcgttcgtgggcatccagccatttgcggcgggtgcgttgcagcaggatgacgagggcggaaatttcctgacgcatattggtgctgagccagaggaagccctgccattggtagtggaggtgttcggcgagggcttccagttcggggttgatggcggtgtcgatgcggatgcggcgggcgtgtctgccgttgataagggcgacggtttgttgcaggtcggtttggagcagtgtgaagtggcggtcaagcagccggatttcgctgccgttgagtttgggagattgcagcttggcggcggtggtcaggagcagctcggtggtgttgacgattttacggtgggcgtgctgcatggcttccatcatggcggggctgatgcggctttcgcccgatgtggcggcgagatggctgcggcttttgaccatgcgtgcgttgatttggcgcattttcgccatgttctcctcgaggcgttcgcgggtcatgcgcctgccgttgctgatttcggcaatcattttgctgcagtcggccaggttgtcggcaagcatgaaacgccacatcagtgtggatttcagcggcagcagtttggcggcggcgatggcgatggccgcgccgatgaggacgttcatggcgcgcatgagtccgctgtcgagccattcgctgccgttgtcgccgatgagcatacacatcgtcagccctgccagcatagggacgtagccgtttttgccgaccgccgcccagccggccagtgcgcttgccgtgccgacggtgaggtagaagaggaggttgccgtggaaataatgctggttcagccataaaacgcccaaacccgcgcccagcccgatgaccgtgccgagcatacgttccaccgccttggagtaaatcgccccttgaaactggagcatgccgaggacgacgaagacggtcatccctatccactcgccgtgttggaggtggagcagccgggcggaggcggtggcgaacaggacggccccgccgagccggacggcgtggatgaggcggcggtagcggtagcgttcgtaggagttgagccagcggctgacgaggcggttgcgttgcgaggtgttcatatcggttgtgccgtctgaagcggaaatgtgaaaaagcacaggcttcccgaggaagggagggtctgtgcttggtattggtgccggagaagggaatcgaacccccgaccttcgcgttacgaatgcgctgctctaccgactgagctacaccggcgttttttcgtcatgatatatatgaacggttgtttgtgcaacttttcgggcgggcggcaaggcagtgcgcggtatagtggattaacaaaaaccagtacggcgttgcctcgccttagctcaaagagaacgattctctaaggtgctcaagcaccaagtgaatcggttccgtactatttgtactgtctgcggcttcgtcgccttgtcctgatttttgttaatccgctatataatgcggtctgcttcggaagagggggacggcgatgtttgtgaacgagaaatatccttatgcggctctgtttgcgggactggtgtttttgacgctgccgtttgcgttggcggtgcatgatgcctttgcgcttgcgttcggacggacggggttgctggtgtcggtgtcggacggcggattcggctggcgtggcggttgggacggcactgtttggtttgtgttcggtgtgtttgcgtttttgaatgtggttgtgtcggcgggtctgacgaaactggcgtacaaaaagatgatgcggcggcattcgcgttacacactgtttctgtcgggcgtggcggcttgcgcggcggcagcggtggcttggattttcgagctgctgcttggcagtggggctttgggcgggctgcgggggaggcggtgttggaatatgcgtttgccgtgtggctggtggcgatgctgacgctgcccaaacgcctgacgcgcgcgccggtgcagccggtggtgtttcacaggaaaaaataggttggaacgggaaatgccgtctgaaacccgacacgcggtttcagacggcatgtttttccgctaacattacgcctgaatatggacaggaagcagatatggaacgcaaagaacgcctgcgtgcaggcattgccgcgatggggctggatatttcggaaacggcgcaggacaggcttttggtctatgtggatttgttgaaaaagtggaacaaaacctacaatctgaccgccctgcgcgacgaggaaaaaatgattgtccatcatcttttggacagcctgacgctgctgccccatatcgagggtgtgcaaacgatgctggatgtcggttcgggcggcggtcagcccggcattccggcggcggtgtgccgtccggatgtgcaaataacccttttggatgcgaatacgaagaaaacggcttttttacagcaggcggttatcgagttggggttggacaatgtgcgcgtggtatccggacgcgtggaggcggtttcggacgtgcgtgccgatgtggttaccagccgtgcgtttgcagaactggcggattttgtgtcgtggacggtgcatctgttgaaagacggcggctactgggcggcgatgaagggcgtgtatccgcaggaagaaatcggccgcctgccgcaggatgtgtgcgttgaaaaagtccaaaggctcgacgtgccgggcttggatgcggaacgccatatcgtcatcctgagcaagcgttgagcgcacttcagacggcatgaataccttttttgtgcggataaaggtaaaattccgcactgtttttcttttttcaacatcagacgggacacgggcgggacatgagtgcgaacatccttgccatcgccaatcagaagggcggtgtgggcaaaacgacgacgacggtaaatttggcggcttcgctggcatcgcgcggcaaacgcgtgctggtggtcgatttggatccgcagggcaatgcgacgacgggcagcggcatcgacaaggcgggtttgcagtccggcgtttatcaggtcttattgggcgatgcggacgtgcagtcggcggcggtacgcagcaaagagggcggatacgctgtgttgggtgcgaaccgcgcgctggccggcgcggaaatcgaactggtgcaggaaatcgcccgggaagtgcgtttgaaaaacgcgctcaaggcagtggaagaagattacgactttatcctgatcgactgcccgccttcgctgacgctgttgacgcttaacgggctggtggcggcgggcggcgtgattgtgccgatgttgtgcgaatattacgcgctggaagggatttccgatttgattgcgaccgtgcgcaaaatccgtcaggcggtcaatcccgatttggacatcacgggcatcgtgcgcacgatgtacgacagccgcagcaggctggttgccgaagtcagcgaacagttgcgcagccatttcggggatttgctttttgaaaccgtcatcccgcgcaatatccgccttgcggaagcgccgagccacggtatgccggtgatggcttacgacgcgcaggcaaagggtaccaaggcgtatcttgccttggcggacgagctggcggcgagggtgtcggggaaataggtcaatccaaatcgggctgcccgtgcctttatgctgtttggccgggtgcgttatagtggattaacaaaaatcaggacaaggcgacgaagccgcagacagtgcaaatagtacggaaccgattcacttggtgcttcagcaccttagagaatcgttctctttgagctaaggcgaggcaacgccgtactggtttttgttaatccactataatatggcggattaaaataaaaatacttatatcgtcatttatcgtcattcccgcaaaaacaaaaaaatcaaaaacacaaaactgaaatatcgtcattcccgcgcaggcgggaatctaggtctgtcggtacggaaacttatcgggaaaaacggtttttccaaccctgagactccggattcctgttttcgcgggaatccggttttttgagtttcagtcatttttgataaattcttgcagctttgagtttctagattcccgcttttgcgggaatgacgcggaaaagttgctgtgatttcggataaattttcgtcacgcttaatttctgttttatccgataaatgcctgcaatctaaaatttcgtcattcccgcaaaaacaaaaaatcaaaacagaagcctaaaatttcgtcattcccgcgaaggcgggaatctaggtctgtcggtacggaaacttatcgggaaaaacggtttttccaaacctgagactccggattcctgttttcgcgggaatccggttttttgagtttcagtcatttttgataaattcttgcagctttgagtttctagattcccgcttttgcgggaatgacgcggaaaagttgctgtgatttcggataaattttcgtcacgcttaatttctgttttatccgataaatgcctgcaatctaaaatttcgtcattcccgcgaaggcgggaatctaggtctgtcggtacggaaacttatcgggtaaaacggttttgccagccctgagactccggattcctgttttcgtaggaatccggttttttgagcttcagtcatttttgataaattcttgcagctttgagtttctagattcccgctttcgcgggaatgacggtttggaagttacctgaaattcaaaaaaaaaacggaaaccggacggattggattcccgcctgcgcgggaatgacggattttaggttttttttttgattttctatttttcgcgggaatgacggtttgggttctttctctttggagttgcgatgccggaaatgccgtctgaaggcttcagacggcatttttgtgccggtttaaaacaaggcctgctgcgcgagcaggtttctgacgggggcgaagtcgcggcggtgttcgggcagcacgccgtatttttcgagggcttccaaatgctgcttcgtgccgtaacctttgtgtttgtcgaaaccgtattggggatggcgttgcgccagtgcgtacatttccgcatcgcgtgcggtctttgccaaaacggatgcggcggagatttcgatgattttgctgtcgcctttgacgacggcttcggcagggatgttcaaatgttcaggaatgcggttgccgtcgatgaatattttttcgggacgcacagccaagccgtcaacggcgcgtttcatcgcgagcatggtggcgtgcaggatgttgaggctggcgatttcttcgggcgaggcggcggcaacgtgccactcaaccgcctgattttttatcatttcggcaagcgcgtcgcgttttttctcgctgagttttttggagtcggtcagtccgggcaggtcgaatgtttccggaaggatgacggcggcggcaaacacgctgccgactaaaggtccgcgtcctgcctcgtccacgccggcggtcagtatgtgcatgatgtttcctgtcgggatggtgggaatgccgtctgaaaagggtttcagacggcatcgcgccgatgtgtttatttcgcgtctttaaacccgcgcttcaaatgcaccatcagcaatgccactgccgcaggggttacgccggaaatgcggctggcttgtccgacggtttcgggtttgtgctggttgagcttttgctgcacttctgccgacaagcctttgactttgccgtaatcgatgccgtcgggcagttttaaggtttcgatgtcgcggcggctgtcgatttcttcgttttggcggtcgatatagccttggtatttgacttggatttcgacttgttcgatgacttcggcggagaggttttcagacggcatcgcgccttcgagcgtcatcagcgcggcgtagtcgaggtttgggcggcgcaggaggtcgtgcaggttggcttcgcggctgagtttttgtccgaacacacggatttgttcgccttcggcgagtttttgcggcgtgtaccacgttgttttcaaacgttggatttcgcgttcgacggcttcgcgtttttcgttgaacatgcgccattgcgcttcggacaccaagccgattttgtagccgtcttcggtcaggcgcatgtcggcgttgtcttccctgagttgcaggcggtattcggcgcggctggtgaacattcggtagggttcgttcacgcctttggtgatgaggtcgtccaccaatacgccgaggtaggcttgttcgcggcgcagcaggagcgggtcttgtccgcgcacatattgcacggcgttcgcgcctgccaataaaccttgcgcggcggcttcttcgtagccggtcgtaccgttgatttgcccggcgaaaaacaatccggcaatggttttggtttcgaggcttgctttgaggttgcgcggatcgaagtagtcgtattcgatggcgtagccggggcgcaggatatgggcgttttccaaacctttcatactgcggacgagcgcgatttggatgtcgaacggcaggctggtggagataccgttaggatagtattcgtgcgtggtcagaccttcgggttcgaggaaaatctggtggctgtctttgtcggcgaagcggttgattttgtcttcgatagacggacaataacgcggacccacgccttcgattttgccggtaaacatcgggctgcggtcgaagcctgagcggatgatgtcgtgggtttgcgtgttggtatgcgtaatccagcaggacacttggcgcgggtgcatatcggcgttgccgcgcacggacatgacgggaacgggcgtgtcgccgggctgttcggtcagttgggagaagtcaatcgtgcgtccgtcaatacgcggcggcgtgccggttttcagacggccttgcggcagcttcaattcgcgcaaacgtccgcccaacgatttggcggcggggtcgccggcgcgtccgccttcgtagttttccaaaccgatgtggattttgccggacaaaaacgtgcctgcggtcaacacgacggcgcgtgctttaaactccacgcccatcgcggtaattacgccgctgatgcgttcgccgtcgagcgttacgtcttcgacggcttgttggaaaaggtcgaggttttcttggttttccaacatttcgcggatggcggctttgtacaggatgcggtccgcctgcgcgcgcgtggcacgcactgccgcgcctttgctggcgttcaggcggcggaactggataccggatttgtcggttgccaacgccatcgcgccgccgagcgcgtcgagttcgcgcaccaaatgccctttgccgatgccgccgatagaggggttgcacgacatttgtccgagcgtttcgatattgtgtgagagcaaaagcgtctgcgcgcccatacgggcggcggcgagtgcggcttccgtgccggcgtgtccgccgccgacgacgataacgtcgtaggttttggggtaaatcatgtgggtcatagtgtgtattgcctgacggtgtttcagacggcatttatagtggattaacaaaaaccagtacagcgttgcctcgccttagctcaaagagaacgattctctaaggtgctgaagcaccaagtgaatcggtttcgtactgcttgtactgtctgcggcttcgtcgccttgtcctgatttttgttaaaccactatattcaatatgccgtctgaaaaacgaaatggattcaaaagtaaagggttgggattgtacgcttgttcgccctgtttttacagtgtgcggaaagggaaaagccgcttcgcggggaagcggctccggtaagggcgggatttaccaaacgtcggatttgatacggcgtttcaggcccggatgttcggaaagtttgaactcggggtctttgcccattttcagcttggcggtgtaatcgcgcagcagcataaacgccaagggcgagagcagcaggatggcgacaaggttgatccacgccataatgcccatcgccatatccgccatatcccagaccaaaggcacattggcaaccgcgccgaaatagacccacgccaaaaccagcatacggaaaacggcggtaatcagccaatggcttttgatgaattggacgttggactcggcataggcatagttgccgataacggtggaaaaggcaaacataaacaggatgacggcgaggaagcccgcgccccattgccccacttggctgacaatcgccgcctgcgtcagcgccgcaccgctcaaatcgccgtaaggctgttggtaaatcaagatgatgaaggcggtgcaagaacaaacgatgatggtatcgacaaacacgcccagcatttgaatcataccttgcgaaacagggtgtttcacttcggcggcggcggcggcgttcggcgcggaacccatacccgcctcgttggaatacaggccgcgtttgatgcccatcatcatcgtttgcgaaatcagaccgccgagtaagccgcctgctgccgcgtcgaatttgaacgcgcccgaaaaaatctgaccgaacacgtccggaatcatcggaatattggtcaaaatgatgaaaagcgcgataaagaggtacaaaaccgccatcagggggacgacgatttccgccgctttagatatgcgcctgatgccgccgaagataatcggcgcggttaaaatcaccagggcgacgccgacataatgaggctcccaaccccatgccgctttgacggtatcggcgatggtattggtctgaaccgcttcaaacacaaagccgaaacagaaaatcaggctcagggcgaacaacacgcccagccatttctgccccagcccttgagtgatgtagtaggcagggccgccccggaaatggtggttgtcgtagtcgcggactttaaagagctgcgccagcgaagattcgacaaacgccgaactcataccgattaaggcggttacccacatccaaaacaccgcgcccggtccgccgactttgatggcgatggccacgcccgcgatattgcccacgcccacgcggctggcaaggccggttacaaatgcctgaaacggcgtgatgccgtgagggtcgtccccctgtttgcggccgccgagcatttctttgatgctgcgcccgaacaggcggaattggacaaagcccgtggttacggtgaagaaaagccccgtacccaaaagcatataaaccaagtatgaccacatcggatcgttgatggcgccgacccagccgtgcagccattcggtaaagttctcgttcatatcgcttccttaaagttgaaactcgcacatattggcggtatgcaagcagggtttaaattttgtaaacgcccattctagcagattgtcaacaaaatcagaaaaatttacatcgccgcgcggctgcggcgttagaatcgcattttgtttggagcaaacacgatgaaacagcctgtttttgccgttacttccggcgagcctgccggcatcggccccgatatttgtttggacttggcgtttgcacgcctgccctgccgctgcgcggtattgggcgacaaaaacctattgcgcgcgcgcgccgaagccttgggcaaaagcgtcgtcctgcgcgacttcgatccagaatcaggcggcgcggcatacggcgagctggaagtgctgcacatccctgccgtcgaagcggttgaggcgggcaaactcaatcccgccaacgccgcctatgtgctgcaacttttggacaccgcgctcgcaggcatttcagacggcattttcgacggcatcgttaccgcgccgctgcacaaaggcatcatcaacgacgcgcgcgcaagcacaggttttttcagcggacacaccgaatatctggcggaaaaaagcggcacggggcaggtcgtgatgatgcttgccggcaaaggcctgcgcgtcgccctcgtaacgacccacctgccgctgaaagacgttgccgccgccatcacgcaaccgctgattgaaagcgtcgcacgcattttgcatcacgacttaaaacacaaattcggcatcaaaaatcccaaaatccttgtcgcckgacttaatccccacgccggcgaaggcggacacctcggacacgaagaaaccgacaccattatccctgcattggaaaacctgcgccgcgaagggataaaccttgccggcccgtatccggcggacacattgttccagccgtttatgctcgaaggtgcggatgccgtattggcgatgtaccacgaccaagggctgcccgtgttgaaataccacagcttcggacagggcgtgaacatcacgctcggcctgccctttatccgcacctccgtcgatcacggcaccgcgcttgatttggcggcaaccggcagggcggattccggcagcctgataactgccgtggagaccgccgtcgagatggcgcgcggcagcctttaaagatgataaaagacccgtcatttccgcgcaggcgggaatccggtctgttcggtttcagttgtttttgggtttcgggtaatttccaaatcgtcattcccgcgcaggcgggaatccagaccattggacagcggcaatattcaaagattatccgaaagtttgaggttctagattcccgttttcacgggaatgacgaaaggtggcgggaatccggtctgttcggtttcggtttttttttttgaggtttcgggcaacttctaaaccgtcattcccgcgcaggcgggaatccagaccattggacagcggcaatattcaaagattatctgaaagtttgaggttctagattcccgttttcacgggaatgacggaatgttgcgggaatccggcttgttcggtttcggtttttttgaggtttcgggcaacttctaaaccgtcattcccgcgcaggcgggaatccagaccattggacagcggcaatattcaaagattatctgaaagtttagaggttctagattcccgttttcacgggaatgacggaatgttgcgggaatccggcttgttcggtttcggttttttttgaggtttcgggcaacttctaaaccgtcattcccgcgcaggcgggaatccaggcctttgggcgacggcaatattcaaagattatctgaaagtttagaggttctagattcccgttttcacggaaatgacgaaatgttgtgggaatccagaccttcgggcagcggcaatattcaaaggttatctgaaagtttgaggttctagattcccgttttcacgggaatgacgaaaggttgtgggaatccagaccttcgggcagcggcaatattcaaagattatccgaaagtttgaggttctagattcccgttttcacgggaatgacgaaaggtggcgggaatgacgaaaggttgcggtaatcatgggaatggcgaagtttcagacggcatcgtccaccctccgccgtcattcccgcgcaggcgggaatccaggcctttgggcgacggcaatattcaaagattatccgaaagtttgaggttctagattcccgttttcacgggaatgacggaatgttgcgggaatcatgggaatgacggaatgttgcgggaatcatgggaatgacggaatgttgcgggaatcatgggaatgacggaatgttgcgggaatcatgggaatggcggaatgtttcggtaatcacgggaatggcgaagtttcagacggcattgcaggtatccgaacccatgtaaaaaagaggttctgcggaacagaacctctttttgccgccgtcggttcagccttgccgggtttcgacttggatcatttcttcggcagggacggttgcgacttcagacggcttgggctgttcggaacggcgcaaaccgcgtccggcttggacttcgggttgtgccgcccatgccttcaatgcggcagggtcggtttcgatcaggacgagtccgccggtttgtgcggtttcccgtgcctgttccgccgcagccgtaaaggttgcggtttcagacggcatttcctgtgcttcggctttcggtgtcgcgccttcgggcaggatggcggcggtggcacggcggattttttccgccgcatcataaaccggtgcgtcgccgtttgaaacggcgggagatgctgtcggaagatccctttctgcaaccggatcggcaatgctgacagtaatcggcgcgtttgcgtcggtttcgccgaaaacgtgcgcggcggcggaacggactttgtcggcggtgtcgtgaatattcaggtactgctcgattttggcggcagacggaatattgcgttttttgccgttttgacggcggtcgcgctgattgttgcgctcgcggcgttctttggcatctcggctgtcgcgttcgcggcggttgcgttcggatttgggcttgctgcctttgtcttctgcggtatgcggttcggacggcgtgttttccgctgtctgaacggttgtttcggcaacggtggcggtttccggcgcggtttggccgcgttcgctgcggctgccgttgcggcggcgttttccggtttgcacttcggtttcggacggtgcggcatctgcaacggttgcggcaggctgtacgttgcggctttggatttccgcttcgttggcgcgttcggcggcacggtcgccgcgttcattgcggcggcggttgccgttgttgcgcgtttcggctttgtcggcacgcgcttcctgtccggcagttttgcctgccacttcgcggacttctactttgctgccttcgcgtttgctgcggcgcgggttttggcggcggttgttggcgcggctgccgctgcggtttgccgtgctgcgtttttcggaggtttcggcagcgggcgcggcttgggtttcgctgccgccgaaaatgcgtttgagccatgctttgaagctgtcccaccaagaggtttttttctcgggggcggcagtcggggcggggctggtgtggcgcacgcctttgacggcgggttcgggacgggcggctttggctttttcgccgccgaacggtttggcggattcgtcttcttccggctcggcgacgcgtttgtagctcggttcgccgtcttcttctacgtcgtcggtgcggatgcggttgatttcgtagtgcggattttcgaggtggatgttcggaatcaggacgacgttgacatccaaacgctcttccatcgcaaacagctcggcgcgtttttcgttcagcaggaaggtggcgacatcgacgggcacttgtgcgcgcacttctccggtgttgtccttcatcgcttcttcttgaatgatgcgtaaaacgtgcagggcggtggattcgatgccccgaatcacgccggtgccggcgcagcgcggacaggcgacgtggctgctttcgcccaaagccggtttcaaacgttggcggctcaattctaaaagtccgaaacgggagagtttgcccatctgcacgcgggcgcggtcttttttgagcgcgtcgcgcaggacgttttccacatcgcgctggtgtttggggttttccatgtcgatgaagtcgatgacgaccaagccgcccaagtcgcgcaggcgcatttgtcgggcgacttcttcggcggcttccatattggttttgaacgcggtgtcttcaatgtctgcgccgcgagtggcgcgtgcggagttcacgtcgatggagacgagggcttcggtatggtcgatgacgatcgcgccgccggagggcaggctgacgctgcgcgaaaacgcgctttcgatttggtgttcgatttggaagcgggaaaacagcggcgtgtggtcttcgtagagtttcagacggcctatattgcccggcatgacgtagctcatgaactcggcaacttggtcgtaaacttcttgattgtccaccaaaatctcgccgatgtcggggcggaaatagtcgcggatggctcggatcagcagcgagctttccataaagagcaggtaggggtcgtgatgcgcttttcctgcttcttcaatcgcctgccagagttgtttgaggtagttcaagtcccattccaactcttccgcgctgcggccgatgccggcggtacgggcgatgatgctcatgccgttcggaatgtcgagttccgccatggcggctttcaactcttgacgctcttcaccttcgatacggcgggatacgccgccgccgcgcgggttgttcggcatcaataccagatagcgtccggcgaggctgatgaaggtggtcagcgcggcgcctttgttgccgcgctcgtctttttcgacttggacgatgacttccatgccttctttgagcacgtcttggatgcgcgcgcgtccgccttcgtagtcttggaagtatgagcgggagacttctttaaacggcaagaagccgtggcggtcggttccgtaatccacgaaacacgcttccagcgacggctcgatgcgggtaatgatgcctttgtagatattgcctttgcgctgttctttgcccagcgtttcgatgtccaaatccagcaggttttgtccgtcgacgatggcaacgcgcagctcttcggcctgcgttgcgttaaataacattcttttcatgatcacctcgtgggcaggcggcgttcagacggcacatgcccggttcggcattccgtaaggctgggttttccgatgttttcggataaaaccggtaatcagtttttgagttgaaaatccgcagggatgcacgttccggagaaccgtgtgcggaagggtcggatacagaaggctataaagatcgatgcggcggtttgtctgccgcgttccgaacgctgcggtcggaaaaatgggggccggcttcttcttgttatcgtgatgcctgtgttttgggcggtttgcgtttgggacttgggcccggctgccgtcttacttccgcgccgaaacggcaaaatcaattcaaacttgattacgttctgcgcctgccggctgggaacaggcgcagggaaaatgctttgcggagtgcgtttttaatataaaattccgttttaaagtaaaccgtttcaggaggcgcggcgggcgcgctttttgctgaaacggatgttcggattatagatgaaaacgcacgaaataagcaaagattcggtcagcttgataggggttgccgaacatgaggcgggtcaacgccttgataactatctgataaaaatcctcaagggtgttcccaagagccatatccaccgcattatccgcgccggcgaggtgcggttgaacaagaaacgctgcaaacccgacagccgtattgcggagggggatacggtgcggattccgcctgtgcgcgtggcggagaaggaaatgccgtctgaaaggcgtgccgccgtaccggcgcgtgcgtttgacgttgtttacgaagacgatgcgcttttggtcatcgacaaaccgtccggcgttgccgtccacggcggcagcggcgtgagtttcggcgttatcgaacagttgcgccgcgcccgtccggaggcgaagtatttggagttggttcatcgtttggacaaggatacgagcggcttgttgatggtggcgaagaaacgcagcgcgctcgtcaaacttcacgaagccatccgtaacgaccaccccaaaaaaatctaccttgcgctgggggtgggcaaactgccggacgacaatttccatgtcaaactgcccctgttcaaatataccggcgcacaaggcgaaaagatggtgcgcgtcagtgcggacgggcagtcggcgcatacggtgttccgtgtgttaagccgtttttcagacggcattttgcacggtgtcgggctgtcgcacctgactttggtgcgggcgacgttgaaaacggggcgcacgcaccaaatccgcgtccacctgcaatctcaaggctgtccgattgcgggcgacgaacgctacggcgattatcaggcgaaccgtcgtttgcagaagttgggtttgaagcggatgtttttgcacgcgtccgagctgcacttgaaccatccgctcacgggcgagccgctggtgttgaaggcggagctgccgccggacttggcgcagtttgcggtgatgttggaaaacgggacgaaaatgtgaaccccgatgccgtctgaagccttcagacggcatcgggacgtgaaagtatgtggggacagacgaatatggctgataaaaaaagccctttgattgccgtcagtgtcggcgaagcgtcgggcgacctattgggggcgcacctgatacgcgccatccgcaagcgttgtccgcaggcgcggtttaccggtatcggcggcgaactgatgaaggcggaaggtttcgagagcctttatgatcaggagcggctggcggtgcgcggctttgtcgaagtggtcaggcggctgccggaaattttacggatacgcagggggctggtacgggatttgctgtcgttgaaacctgatgtctttgtcggtatcgatgcgcccgattttaatttgggtgtggcggaaaagctgaaacggtcggggattccgaccgtgcattatgtcagcccgtcggtgtgggcgtggcggcgggaacgtgtgggcaaaatcgtgcatcaggtcaaccgcgtgttgtgcctgttcccgatggagccgcagctttatctcgatgcgggcggacgtgcggagtttgtcggtcatccgatggcgcagcttatgcccttggaagacgaccgtgaaacggcgcggcaaactttgggcgtggatgccggcatccccgtattcgccctgctgcccggcagccgcgtcagcgaaatcgactatatggcgccggtgttttttcagacggcattattgttgttggaacgctatcccgccgcacgcttcctgctgcctgccgcaacggaggcgacgaagcggcgtttggcggaagttttgcagcggccggagtttgccggattgccgctgacggtaatcgacagacagtctgaaacagtgtgcagggcggcggatgcggtgctggtaacgagcggtacggcaactttggaggtggcgttgtgtaagcgtccgatggtcatcagctacaagatttcgccgctgacctatgcttatgtgaaacgcaaaatcaaagtgccgcatgtcggcctgccgaatatcctgttgggtaaggaggctgtgccggaattattgcaatctgaagcaaaaccggaaaaactggcggcggcgttggcggactggtacgaacaccccgataaggttgccgcgctgcaacaggatttcagggcgttgcacctgctgttgaaaaaagatacggcggatttggccgcgcgcgcggttttggaagaggcgggatgttgagcggttaatggattattttcccgaagcagcacgtattacaaaaaaagggggagaaattgtgattaatggcacatcaaacaataagtatttaagaggaattccaaatgaaacagaactggcccgaatgggattaaggttaaaatataatggtcagttaactgattaattttgttatatatgatttatgattatagcttatactaatacgcttacttaccttgtttcatttgttcttcgtaaatttctattttaggcaattgtgtcagttcaatagggcaagttgctccccaccaaaaatgttctacataaaaccaaggattatctggaaaatatagcaacatctcttccatatccggccaaattcttcttaattcatctacctgtgtttttggcgaaccagttaatatttttggaggattttcacgataatcgcataattcaataacaccatctgataaaagttcttccaaaaaatcaaaaaatctaatttttaaatttggatctttgatatccatatttaaataatttttataaacaccaaaaataccacctaaatattcacaatattctaaaagattatattttatcttcacattcataacgtaacctttatctaaattttaattctaatctttgcccatgtactgaatcaggttgattcctaaactcaatcgtccattttgctccagtttgttctcggctagttgaaaaattccttaaaataaaggaagagtttaaacaactgaaatttcataagagtagtagaaccaacttggactcaaaaaatcttaaactcattgtttttgaaaaggtaaaataatatgacaacttataccattccaaaaaaagattatcaatttctgtatatatatgagggcactctattaaactatactttgaaaaacgatgaattccatatcatcgtccagaatgtggattatccggactttcctcaagagattcctacaccaaattatacagactgggtaaaaattaaattcaagcagttcagctatctgaaatttatctatggatacgccacgaagaaccaagataaaaatatcaaaaatgtattggaacttggagaattaaagcaggatgatgaaatcttggattatggaggtgcgctggaagtgataggcagtaggtatgatcttccgaccggttttagtatagatatagtttgccgggaaatagagttagaatttttagatcaggagagtttcaattaaacgagccgtagcttgttatgctgagcaggcaactttatcgtatttccttttcggttgaaaccccgccactcggacatctgtccttcggggcggtagaatcagattttatttgggaggggcgtaaccccttccgaatcagggcaacacatagggcgacgctttatgtgtcgtcctgtgtgttgaaacattgatatgccgatacggagcctgtcggcaaaatgccgtctgaacaatatcttttcagacggcattttgtatgggggttaacggttgttcagcccgagtacgtcctgcatatcgtacaaacccgttttgccgttgacccaaactgcggcgcggacggcaccggcggcaaaggtcatgcggctgctggccttgtgggtgatttccacgcgctcgccgtcggtggcgaagagggcggtgtggtcgccgacgatgtcgcctgcgcggacggtggcaaagccgatggtcgacggatcgcgcggaccggtgtggccttcgcggccgtaaacggcgcattgtttgaggtctctgccgagcgcgccggcgatgacttcgcccatgcgtaacgcggtgccgctgggggcatcgactttgtggcggtggtggccttcaatgatttcgatgtcgtagccttcgtttaatacgcgtgcgacggtgtcgaggatgtggaaggtgaggttgacgccgacgctgaagttggcggcgaaaacgatgcctgttttttcggcggcagtgtggatagcggctttgcccgtatcgtcgaagcctgttgtgccgatgatgatgttgacttgtttttcaacgcatttttgcaggtgtttgagggtgggctcggggcgggtgaagtcgatgagtacgtcgctttgtgcgagaacggcgtcaacgtcgtctgaaatggcgatgccggttttgagtccgacggcgtagcctgcgtccagcccgagggcttctgagcctgagtgttcaagcgcaccggaaaggacggtgtcgggatggttgttgacggcttcaaccaatacgcgtcccatacggccgtttgcgccggcgatggcgattttgagcggtgtcatgtgtgttccttatggtttgtctgtgttttggcggtctttgagggcttcggcagcgttttgcaggacgtcgccttcggtgcggacgagtacgccgttttcaaaatagacggtcagattgctgcgttctttgatgatgccgttgcgggaggtgttgaaggtatagtcccagcggtcggtatggaatgcgtcgcgcagtatggggctgccgagcaggagcaggacttggtctttggtcatgccggggcggagggcggcaacggcgcgcggttcgagttcgttgccctgtatgattttgagtttgtacgaggggaacagtgaaacgcgttcggcactgcacgcggcaaggccgaggagggcggaaagggcgaggatgagggttttgttcacggaaatgcctttctgtgcaaatcgggatgggtagtgtaacactgcttgaatattttataaaagcgaacgataatcatacgattaagcggtatccgccctgtccgcgcatcggccgccggtgcggttttactattgcaaactgctatggtgcgatagtgggcaaacaggccgaaattgcgtattataacgtctattgttttacaggggtattgaatattatggaaaaattcaacaatattgcacaactgaaagacagcggtctgaaggttaccggcccgcgtttgaagattttggatttgttcgagacgcatgcggaagagcatttgagtgcggaagatgtgtaccgcattttgttggaagagggtgtggaaatcggtgtggcgacgatttaccgtgtgctgacccagtttgagcaggcgggcattttgcaacgccatcattttgaaacgggcaaggcggtttatgagttggacaaaggcgaccaccatgaccacatcgtctgcgtgaagtgcggcgaggtaacggaattccacaatcccgaaatcgaagccctgcaagacaaaatcgcggaagaaaacggctaccgcatcgtcgatcacgcgctttatatgtacggcgtgtgcagcgactgtcaggccaagggcaaacgttaaatccggacggtttgttgttcagacggcattcatgattttggatgccgcctgtgtttttggagaactgtcatgcgtattccgctgcttgcccctgacaattatgcctttcccgatcctgcctatgctttggcccggtgcgacgggctggtcggcgtgagcggcgatttggatgcggggcggctgcttgaggcgtatcggaacggcgtgtttccgtggttttcccgggacgggtggtttttttggtatgcggtcgggccccgtgcggtggtgtttcccgacaggctgcatattccgcgctcgctggcgaaaacgctgcgcaacggcagctatcgggttgcggtcaacggctgttttgcggaagtggtcgcgcattgtgcggcagcggcgcgcccgaatcaggacggaacttggattgcgcccgagtttcagacggcatatttgaagctgcacgaaatggggtacgcgcattctttcgagtgccattatcccgatgaaagcggtgaaacgaggttggcgggcggcttttacggcgttcagatcggcagggtgttttatggcgaatcgatgttcgcattacaaccggatgcgtcgaaaatcgcgtttgcctgcgccgtgccgtttttggcggatttgggcgtggaactgatagactgccagcaggatacggaacatatgcgccgtttcggttcggagctgctgccgtttgcggattttgccgaacgtctgcggatgttgaacgccgtgccgttgaaagaggaaatcgggcggcgcgaagtggcgtgcaaggggctttgatggcggcttatgctccggtcaggttcaaatatggtggattatagtggattaacaaaaatcaggacaaggcgacgaagccgcagacagtacaaatagtacggcaaggcgaggcaacgccgtactggtttttgttaatccactataaaattagaaatgacgacagccggataaaatcacggtgaaaatgaaaaatgccgtctgaaacttgaaaacatcgggtttcagatggcattttgtttgacggtttgttgcttatttgagcgggcgcacttcaagtccgaacatacggcgtgcggtgttcagcatttggcagctgaagccccattcgttgtcataccaagcgaacactttgaccatgttgccgtcaacgactttggtcagtgttgcgtcgaagtggctggcttcggtagtgtggttgaagtccatggaaaccaagggcagggtgttgtagcccaaaacgcctttgagcgggcctgcttccgaggcggctttcatcagtgcgttgatttcttcgactgtggtgtcgcgcgcggcttggaagctcaaatctaccaatgatacgttgacggtcggcacgcggatggcaagcccgtcgagcctgcctttcaattcgggcagtaccaaaccgacggcttttgccgcgccggttttggtcggaatcatgttttccacgccgctgcgggcgcggcgcaggtctttgtggcgcacgtcggtaacggtttggtcgttggtcagcgcgtggatggtggtcatcgcgcctttgacgatgccgacgctttcgctcaacactttggcaaccggcgagaggcagttggtggtgcaggaagcgttggaaacgacggtcatgtcggcggtcaggacgctgtcgttcacgccgtacacgacggttgcatcgacatcgtcgccgcccggtgcggaaatgaggacttttttcgcgccgctttcgaggtggattttggctttttctttgctggtgaacgcgccggtgcattccatgaccaaatcgacaccgagttctttccacggcagttcggcagggttgcgggtcgagaagaaggggattttgtcgccgttgacgatgaggttgccgccgtcgtgggatacgtcggcttcaaagcgtccgtgcacggtgtcgaatttggtcagatgggcgttggtttcaaggctgccgctggcgttgacggcgacgatttggagttggtcttgaatctgataatcgtagatggcgcgcaaaacctggcggccgatgcgtccgtagccgttgatggcgactttgatgcccatggtttgttcctttgttgagggttgggtagattttcggggcggattatagcaaatttgtagtggcgtgtaattaatattttattgaaaacggcgcggccggaagggtgggcggtaagatgcggacggcacgggtgcggcggacggagagcttgataaaatgccgtctgaagcggcttcagacggcatatcagggaagggtcaggaggcggtattctgtgcggcttcctgtttggctttgtattgtttgagatattcgagggcggcggctttttcgctgtcgctgccgtatttcatatcgcgttgggcgcggcgcaactcggcgcgttcgcgggcttcggctatctgtttcgcctgatagtctttgcggttgtcggcggcggcgaggcggtcttgttgggtttgcgcttttgccatggctttggcgatgaggtcggcagggttaaacgtcggttttttcggtgtgtcgggcgtttgcggacgcgcgttgcggacggcggcttcgcgttcggcaagcatggccttgcgttcgtcggcttcgcgctgtttgcgttcgttgcgtttgaggtagcgcgtgcgcgcgtgttcggcggcggcaaaacggctgtcggcggacaggctgaagcggcgcgcgcggggcaggacggtgtcggcaacgggctgcatatggatgcagtcgacggggcagggggcgacgcagagtccgcagccggtgcattcgtcggcgatgacggtgtgcataagtttgcccgcgcccataatggcatcggcagggcaggcgcggatgcaggcggtgcagccgatacaggcggtttcgtctatccgggcgagtgctttggcttgggttttggcaggtgcgacaaagggtttgccgagcagggcggaaatgtcccgaatgacggtttctccgcccggggcgcagaggttgtacgcttcgcctgttgcgactgcctgtgcgtagggcaggcagccgtcgtagccgcattcgcggcattgggtttggggaagcaggcggtctatggcggcggctgtggcggtcatgtcggtgtgcggctcaaaatcgaaagggcgtattttagcagaattgtatgccgcgcccgtttcggatggtgcgcggtgttttgttataatgcggcggcgtatgccgtttcagacggcatttttctgtattttcctgttcggacggtctatgaacgaattttcgcttgcccctattgtgattgttttgctggtgtcggtcattacggtgatcctgtgccgcaagttcaacattccctccatgctgggctacctgctggtgggctttttggcggggcccggtatgctcagcctgattccgaaaagccatgcgacggattatttgggcgaaatcgggattgtgttcctgatgttcagcatcggtttggagttctcgctgcccaagttgagggcgatgaggcggctggtgttcggtctgggcggtttgcaggtcggcattacgatgctgtcggtaatgggcatactgatgctgacgggcgtgccgttcaattgggcgtttgccgtgtcgggcgcgttggcgatgtcgtccacggcgattgtgagccggattttgtcggaaaagacggaattggggcagccgcacggtcagatggcgatgggcgtgctgctgatgcaggacatcgccgtcgtgccgctgatgattctgattcccgcgctggcgggcggaggggacggaaatatttgggcggccttgggtttggcgtttgcaaaaatgctgctgacgctggggctgctgtttttcgtcggcagcaaaattatgtcgcgatggttcaggatggtggcaaaacgcaaatcgtccgaactctttatgatcaatgtgctgctggtaaccttgggtgtggcttatctgactgagctggaaggtttgtctatggcgttgggcgcattcgttgccggcatgctgctttcggaaacggaataccgtttccaagtcgaagacgacatccgcccgttccgcgatattttgctcggctttttctttatcacggtcggcatgaagctggacattcaggcattgatcggcggctggcggcaggtattgatgctgttggcaatgctgctggtgttgaaggcactggttgtgtttgccattgccttcaaaatgaaacattcggtcggcgacagcctcaaaacggctttgtatctcgcgcagggcggcgagttcggcttcgtgatgctggccattgccgggcagcttgatatggtttcgccagaatgggaacaggcggcgacggcggcggttctgctgtcgatgattatcgcgcccttcctcttgggcggcagcgatgcgctggtcgggcgtttggtcaagtcaagctgggacatgaagtcgctcgatctgcacagtatgctggtagaaaccatgagcaagtccgaccatgtgctgattgtcggcttcggcaggggcgggcagacggtcggacgcgtccttgcccaagaggatattccgtatttcgcgctcgacttggacattgcgcgggtgcaggttgccagaagtgcgggcgaaccggtgtcgttcggcgatgcgaaacgcagggaagtattggaagccgccggtctgggacgggcgaaaatggtggtggttacgctcaacaatatgcacgaaacgcaacacgttttagacaatgtgctgtccatgtatcccaatatgcccgtatatgtgcgcgccaccaacgacgattatgtgaaaacgtttaccgatataggtgcggaagaagccgtgtcggacaccaaagaaaccggactcgtgctggcaggctatgcaatgttaggcaacggcgcgtcgtatcggcacgtctatcagacgatggcaaatatccgccacagccgttatgccgcgttggagggactgtttgtcggtagtgatgatgaggcaggattcggcgaaaacggcgaaaccgtccgtcacgcctttcctttggctgcagaagcatacgccgtcggcaaaacagtcggcacgcttccgatggcggcttacggcatcaaactcttgttcgtccgccgccgcaccggccggattgaaaacccggatgcctcgtttacattggaaggcggtgacgtgttggtggtcgcaggcaaaaaagaagaaattatctcttttgaaaactggagtttgcagggaatataaatgaaatgccgaaataaggcttgcgccatttccggttatttggtttaataacgctttcgcaaatcgcaagggtgattagctcagttggtagagtgtctgccttacaagcagaatgtcggcggttcgactccgtcatcacccaccaagttttctttcattgttgcaaacaatggatgcgcggtggtagctcagttggttagagtaccggcctgtcacgccgggggtcgcgggttcgagccccgtccgccgcgccaagtttcaaaatactgactctgtcggtattttttatacacgggtgattagctcagttggtagagcgtctgccttacaagcagaatgtcggcggttcgactccgtcatcacccaccaagttttctttcattgttgcaaacaatggatgcgcggtggtagctcagttggttagagtaccggcctgtcacgccgggggtcgcgggttcgagccccgtccgccgcgccaaaagttaaggaataccaacctccggttggtatttttttgtttgtatgctttgaaaaatgtttgtttccggattttgccattcccatccggttttgcgctgtacgatgtgttttagcgcggacttgctcaaaatcgcatgtgattccggtatttgaggctttgattagggatgcggactttcaatatattttctcagctacaacaacgaaggcttgatgtctgtcgggcaggtaagggagatttttgagcgtttcggcaaatataatttggttcaaacggaataccggcgttttaaggcagataagacagaaaaccgtaatcataaggcaaattcgatattcgaatttctgcatattttagaaaagaccttttatagtggattaacaaaaaccagtacagcgttgcctcgccttagctcaaagagaacgattctctaaggtgctgaagcaccaagtgaatcggttccgtactatttgtactgtctgcggcttcgtcgccttgtcctgatttttgttaatccactataaaaattcttgccggatgctgcaaacaacgccggtttgcattcctgatggcggtggttttcttagacgaacgcccgaacacgcaggaatggataggcttggggctggttacggcgggcgtgttgacgctggcactgaaacggtaaagccgcaagaaataaatgaaatgccgtctaaaaaactgttttcagacggcattttcgtttctgtccatcctcagcactcgaccacgcgcacggatacggggacggcttttttccggagcgtggcggcgagtccggcaagcgaggtttctttgtaggtcgccttcatatcccggccggtttgcagcatggttcggatgacttcgtcgagcgagacttttttgtccgtgccgtcttccaaaagcgcgagcgtgccgagtttgagggctttttcggcggcgatgccgttgcgctcgatgcaggggatttgcaccagtccgccgacggggtcgcaagtcagccccaaatggtgttccatcgccatttcggcggcgttttccacttgtttgggcgtgccgccgatgacttcggcgtatgcgcccgccgccatcgaacacgctacgccgacttcgccctgacagccgacatccgcaccggaaatggaggcgttggtcttgtagaggatgccgattgcgcctgcggtgagcaggaagttttcgacgcgttcctgtgtggcgtgcggattgaacttgcggaaatagtgcaatacggcgggaatgatgcctgccgcgccgttggtcggtgcggtaacgacgcgtccgccggcggcgttttcttcgttgaccgccatggcgtacaccatcggccagagctgggtgttgacgatttcggtttcgcgcaggactttgagcttggcggcaagctgcggggcgcggcggcggacgttcaatccgctgggcagttcgccgtccgcacccaagccgcgtttgatgcagccttccataacctcggcaacggcagcggcgcggcggcggatttcggcttcgccgcatccggcaagcgcggcttcgtttgccaacacgacttcggagatgtcgagccggttcagacggcatcgggcaagcagttcggcgcaactggtatagggatagggaacggctttttccgtttccgcctgccggtcaaaatcttcttcggtaacgacaaagccgccgccgaccgaataataaacctgttcattcaataccgtgccgtctgaagcataggcggtaaaacgcaggctgttggggtgtttgggcagcacttgattgccgagtatgttcaggtcgcggtcggggatgaagcggatttcttgcccgttgagccggaggatgtgctgcgtgcggatgcgttcgaggcgttcgggaatgccggcaagcgggatgtcgtgcggcaggctgccttccaaaccgagcatcagcgcgtcaaatgtaccgtgtccgtatccggtcagtgcgagcgagccgtaaatgtcgatgacgatgcgaacagcctgtgcatccaaacctgccgcaaaggcggcggctgccttcatcgggccgaccgtatgcgaactggaaggcccgataccgattttgaaaatatcgaaaatgctgatcatattttgctccgacggtttttcagacggcacaggttccgtttgaccaaccaaaaaggagacgcggcacgatgcccgtctccttttttaaaacggcacttatgcgtcgatattttgggcaatcagcgcgttgttttcgataaaggcacggcgcggctcgacctcgtcgcccatcagcgtaacgaacacttcgtcggcggcaatggcatcttcgatgcgcactttcaacaggcggcgcacggcgggatccatcgtggtttcccacagctgctcggggttcatctcgcccaagcctttgtatcgttggatggacatacctttttgggcaacgctcatcaagatgtccaaagcggtttcaaagctgtccgcgtcgtacccgttttcgcctttgtaaagcttggcaccctcgccgaccatgcctttgagcgcggcggcggtttgggtgagggtttggtaggctttgctgttgaggaacttgggttcgatgtagctgaccatgacgttgccgtgcagcttgcgcgtgattttgatgaaccggtgtccttcatgaccttcgatgcgttcgagggcgacttctttttcgtcaagcagaccggaaagttcggcaacggctttatcggcgttttcagacgacgtcaaatcaatgggcgacgcgtgtagcatggcgcgcaggacgagttcgtctacgaagcggctttcctgttcgatgacggtttttgccaacaggaattgtttggcggtgtcggcaagttctgcgccttcgatggtgcggccgtctgaaatgattttggctttttccaaggcaagaccgagcagccattggtctttttccaactcgtccttgaggtaacgttcctgtttgccgtatttcgctttatacaaaggcggctgggcgatatagatgtagccgcgctcgaccagctcgggcatttggcggtagaagaaggtcaggagcagggtgcggatgtgcgcgccgtccacgtcggcatcggtcatgatgatgatgcggtggtaacgcagtttttcggcattgaattcttctttgccgatgcccgcgcccaaagcggtaatcagcgtggcgacttcttggctggccagcattttttcaaaacgtgctttttcgacgttcaaaattttacctttgagcggcaaaatcgcttggaatttgcggtcgcggccttgcatggcggaaccgcctgcggagtcgccctcgacgaggtagagttcggacagggcagggtctttttcttggcagtcggcgagtttgccgggcagtcccaagccgtccatcacgcctttgcggcgggtgatttcgcgtgctttgcgggcggcttcgcgcgcgcgggcggcatcgacgattttgccggtgatgattttggcttcgttcggattttcttcgaggaagtcggtcagggcttggctgatgacttcgttgacaacggggccgatttcgccggaaaccagtttgtctttggtttgggacgagaatttggggtcgggcagtttgacggacaacacgcaggtcaaaccctcgcgcatatcgtcgcctgcggtttccactttggcttttttggcgacttcgttggcttcgatatagttgttgatggtgcgggtcatcacttggcgcagtgcggtcaggtgagtaccgccatcacgttgcgggatgttgttggtgaaacactgcacgctttcttgatagctgtcattccattgcatcgcgcattcgacgctcatgccgtctttttcgccgaacgcgtagaagattttttcgtgcaacggcgtttttttgcggttcatgtattgcacgaaacccgccacgccgccggaaagggcgaagctttcgtgtttgccgtcgcgctcgtcggtcaattcgatgtccacgccgttgttcaggaaggaaagttcgcggatgcgtttggcaaggatgtcgaagctgtattcgacgttgccgaaggtttccgtactggcgaggaagcgcacggtcgtgccttttttatcggaatcgccgacaattttcagcggctcttcggtttcgccgcgcacgaagcggacgaagtgttctttgccgtcgcggtagatggtcagcgttacccagtcggacagcgcgttgacgacggacacgcccacgccgtgcaggccgccggagattttgtagctgttgttgtcgaatttaccgcccgcgtgcaatacggtcatgatgacttcggcggcggagcgtccttctttcgggtggatgccggtgggcataccgcgcccgttgtcggcgacgctgacggaatggtcggcgtgtatcgttaccgtgattttgtcgcaatgtccggcgagtgcttcgtcaatggcgttgtccaatacttcgaacaccatgtggtgcagaccgctgccgtcctgcgtgtcgccgatgtacatgccggggcgtttgcgtaccgcttccaagccttcgagcacctgaatgctgtcggcgccgtattcttcgtgtttttgttcagtcatattttttgccggattttgaaaagattttgcgatgccgccaaaacaagtccgcaccttgtagaaaaagcgggcgggacgacatatataattgtgtattatagccgattttgccgcctaattcagcgttatccgcatcagtgtgccgccgggaaaagatgaaacggtacgtttgcctccggcatcaggtcggggattgtcccgtaaagtggcaaaagcgtttttttgccactaaaatctacaccctatacttttcggacaggggcgcggaaatggaaatatggaatatgttggacacttggctcggtgccgtcccgatacgtgcggaggcggtcgaatccgtggcggcggttgcggctttgctgctggcgcgcgcccttctgttgaatatccacttcaaacggcatccggatttcggcatcgaaagcaagcggcggtttttggttgccagccgcaatataacgctgcttttggtgctgttttcgctggcatttatctggtcggcgcaaatccaaacgctggctttgtcgatgtttgcggtggcggcggcggtcgtcgtggcgacgaaggaactgattatgtgtctgtcgggcagtattttaaggtctgccacccagcaatactcggtcggcgactatatcgaaatcaacggcctgcgcgggcgcgtggtcgacatcaacctgttgaacacgctgatgatgcaggtcggtccgaaccccttggtcggacagcttgcgggaaccaccgtttctttccccaacagcctgttgttgagccaccccgtgcgccgcgacaatattttgggcgactatgtcatccatacggtcgaaatccccgttcccatccatttggattcggatgaagccgtatgccgtctgaaagccgtactcgagcccttgtgcgcgccctacatccccgccatccaacggcatttggaaaacgtgcaggcggaaaaactgtttatcacgcccgccgccagaccgcgcgttacccgcgtgccgtacgatgacaaggcataccgcatcatcgtccgcttcgcttcccccgtttcaaagcggctggaaatccaacaggcggttatggacgaatttttgcgcgtacaataccgcctgttaaatcaccccgccggctccgaaacactttaactttccccgaccgaccccatttccggcttcagacggcatattgccgatatgctgtctgaaacacaacacgcaaaggaaacccatcttatgactgacaacgcactgctccatttgggcgaagaaccccgttttgatcaaatcaaaaccgaagacatcaaacccgccctgcaaaccgccatcgccgaagcgcgcgaacaaatcgccgccatcaaagcccaaacgcacaccggctgggcaaacactgtcgaacccctgaccggcatcaccgaacgcgtcggcaggatttggggcgtggtgtcgcacctcaactccgtcgccgacacgcccgaactgcgcgccgtctataacgaactgatgcccgaaatcaccgtcttcttcaccgaaatcggacaagacatcgagctgtacaaccgcttcaaaaccatcaaaaattcccccgaattcgacaccctctcccccgcacaaaaaaccaaactcaaccacgatctgcgcgatttcgtcctcagcggcgcggaactgccgcccgaacagcaggcagaactggcaaaactgcaaaccgaaggcgcgcaactttccgccaaattctcccaaaacgtcctagacgcgaccgacgcgttcggcatttactttgacgatgccgcaccgcttgccggcattcccgaagacgcgctcgccatgtttgccgccgccgcgcaaagcgaaagcaaaacaggctacaaaatcggcttgcagattccacactacctcgccgtcatccaatacgccgacaaccgcgaactgcgcgaacaaatctaccgcgcctacgttacccgcgccagcgaactttcagacgacggcaaattcgacaacaccgccaacatcgaccgcacgctcgcaaacgccctgcaaaccgccaaactgctcggcttcaaaaactacgccgaattgtcgctggcaaccaaaatggcggacacgcccgaacaagttttaaacttcctgcacgacctcgcccgccgcgccaaaccctacgccgaaaaagacctcgccgaagtcaaagccttcgcccgcgaaagcctgaacctcgccgatttgcaaccgtgggacttgggctacgccagcgaaaaactgcgcgaagccaaatacgcgttcagcgaaaccgaagtcaaaaaatacttccccgtcggcaaagtattaaacggactgttcgcccaaatcaaaaaactctacggcatcggatttaccgaaaaaaccgtccccgtctggcacaaagacgtgcgctattttgaattgcaacaaaacggcgaaaccataggcggcgtttatatggatttgtacgcacgcgaaggcaaacgcggcggcgcgtggatgaacgactacaaaggccgccgccgtttttcagacggcacgctgcaactgcccaccgcctacctcgtctgcaacttcgccccacccgtcggcggcagggaagcccgcctgagccacgacgaaatcctcatcctcttccacgaaaccggacacgggctgcaccacctgcttacccaagtggacgaactgggcgtatccggcatcaacggcgtagaatgggacgcggtcgaactgcccagccagtttatggaaaatttcgtttgggaatacaatgtcttggcacaaatgtcagcccacgaagaaaccggcgttcccctgccgaaagaactcttcgacaaaatgctcgccgccaaaaacttccaacgcggcatgttcctcgtccggcaaatggagttcgccctctttgatatgatgatttacagcgaagacgacgaaggccgtctgaaaaactggcaacaggttttagacagcgtgcgcaaaaaagtcgccgtcatccagccgcccgaatacaaccgcttcgccttgagcttcggccacatcttcgcaggcggctattccgcaggctattacagctacgcgtgggcggaagtattgagcgcggacgcatacgccgcctttgaagaaagcgacgatgtcgccgccacaggcaaacgcttttggcaggaaatcctcgccgtcggcggatcgcgcagcgcggcagaatccttcaaagccttccgcggccgcgaaccgagcatagacgcactcttgcgccacagcggtttcgacaacgcggtctgacggcagggttgaagtaaaaaatatggcggattcgatagaaaaacatccgcaccgtcattcccgcgcaggcgggaatccagaccggtcggtgcagaaacttatcgggaaaaacggtttctttagattttacgttctagattcccactttcgtgggaatgacgcggaaaagttgctgtgattccggataaattttcgcaacgtttaatttccgttttacccgataaatgcccgcaatctcaaatcccgtcattccccaaaaacaaaaaaatcaaaaacagaaatcccatcattcccgcgcaggcgggaatccaggtctgtcggtgcggaaacttatcggataaaacggtttctttagattttacgttctagattcccgctttcgcgggaatgacggaatatttttgaatttgataaaaatgccgtctgaaacggtcaaacaacgcttcagacggcattttatagtggattaacaaaaatcaggacaaggcgacgaagccgcagacagtacaaatagtacggaaccgattcacttggtgcttcagcaccttagagaatcgttctctttgagccaaggcgaggcaacgacgtactggtttttgttaatccactatattttccgacatcattgaatcaaacccaaatgcgacaagagcgtccatgtgccgatggcaatcaacaccaaacctccggcaaattccgcacacctgccgaacaatacgcccaaagcccttcccgccgtcagcccgaccgccaccatcaccgtcgtcgccataccgatgattgcggcggcaaaggcgatgtttacctccataaacgccaagcccaccccgactatcatggaatcaatactggttccaaaagcagtcaaaaccgtcatccataggctttcccgtttgctttcgcgcacatcttccgcctcgccggacagcccttcgcgcatcattttcagacccagcccgcccagcaggacgaaagccacccaatggtcccattcgctgataaacggcttggcataaaaaccgcctacccagcctgccagcggcgtgagcgcttcaaccgtgccgaacaccaaagccgttgccgcaattttgcgcggaggcattctgaccgccgcaccctttgccaatgcgacggcaaacgcatccatcgacatccccagagcaatcaagagcaaagcataaaaacccataccgcacccgtcctcaaaaagggcggattatagcaaaagcaaaaaaatgcaaaaatgccgcacgaaaacccgcatcccgtcattcccgcaaaaacaaaaaatcaaaaacagaaatcccgtcattcccgcgcaggcgggaatccagagttgtcggtgcggaaacttatcggataaaacggtttctccaaccccgagtccttgattcccactttcgtgggaatgacgggatattttgcgtttaataaaaaacgcccgctgaaacggcggggcgggatgggggaatgccgtctgaaacggtcggacaatgtttcagacggcatttttatgcccggttatttccgatagcggacggcgcgggacaggatttcttcaatttccatccacataatgcccccttacagcaaaccagcctgacccagtgcgggatcggtcgcgcgggcggcttgggcatcttcgacagtcagtccaagggctttggccacgccttcgccgtatgccgggtcgcaacggtagcagttgcggatatggcggtatttgatgaagtcgggcgcgtcgcccattgcggcggcggtgttgccgaacaatgcctgtttctgcgcgtcgttcatcaggttgaacagggcgcgcggttggctgaaatagtcgtcatcgtcttggcggtagtcccagtgtgccgcgtcgccgttgattttcaaaggcggttcggcgaagtcgggttgttgctgccattggccgaagctgttgggttcgtagtgcggcaggctgccgtagttgccgtcggcgcggccttgcccgtcgcgctggttgctgtgaacagggcaacgcggacgattgacgggaatttggcggaagtttacgcccaaacggtagcgttgtgcgtcggcgtaattgaacaaacgcgcttgcagcattttatctgggctggcgccgacaccgggaacgaggttgctcggtgcgaaggcggattgttccacatcggcgaagaagttttcgggattgcggttcaactcgaattcgcccacttcaatcagcggatagtcttttttcggccaaactttggtcaagtcaaacggatgataaggtactttttccgcgtctgcttcaggcatgacttggatgtacatcgtccatttcggaaactcgccgcgttcgatggcttcgtataagtcgcgctgatggctttcgcggtcgtcggcgatgattttggcggcttcttcgttggtcaggtttttaatgccttgttgggtgcggaaatggaatttcacccaaaaacgctcgcctgcttcgttccagaagctgtaggtatgcgaaccgaagccgtgcatatggcggtagccggcggggatgccgcggtcgctcatcacgatggtaacttggtgcagtgcttcgggcagcagcgtccagaagtcccagttgtttgtggcagagcgcatattggtgcgcgggtcgcgtttgacggctttgttcaggtcggggaacttacgcgggtcgcgcaggaagaacacgggcgtgttgttgccgaccacatcccagttgccttcttcggtataaaatttcaaggcaaaaccgcggatgtcgcgttctgcatcggctgcgccgcgttcgcctgccacggtggtgaaacgggcgaacatctcggtttttttgccgacttcgctgaagattttggcgcgggtgtatttggtgatgtcgtgcgttacggtaaacgtaccgaacgcgcccgaacctttggcgtgcatacggcgttcggggatgacttcgcgcacgaagtcggcgagtttttcattcagccacaaatcctgcgccagcagagggccgcgaggaccggcggtcaggctgttttgattgtcggcaacaggcgcgccgttgttcatggtcagatgggttacagggcatttggaggtagtcatcgctcttgttccttttctcaggttggtcaaatgggggtaaacggcttacagtacgatttggcggaaagcgtattcgtaaccggtttcttgattgcaataaatttcttgaatcgacattttatttcccttttgtaaaaactatggatgcgactatacgccaagattttcgctattaaaactatgaaatcgatttaatattattataagcaatcggttcttgattttcgtttgttttttgttatcgaacggaatccgaacccgctcattaaaaccatttataatgcaatgacgctttgcggcattttttgcgccgacaggctgaaaataacaattttccccacattatcatgaccttactcggaataaagctcaaacagacccagcagctcaaccagcggctgcaacaatctttgcgcgtattgcagatgtcgggtatcgaacttgaacgcgaggtcgaaaactggctgtcggacaaccccctgctcgaacgcaaagacacggatgaattttccgatgccgagttcagccattacactgcgcctgcccgtcaaatcggcggagacgaaggcgaagatatgctgtccaacatcgccggcgagcaggatttcaagcaatacctgcacgcgcaagtatgcgaacacccgctttccgaccaagaagccgcctgtgtccacatccttatcgatttccttgacgagcagggttatctgaccgacagcatcgaagacatcctcgaccatacgcccttagagtggatgttggatgaagcaatgctgcaacacgcgctgaccgcattgaaaaaattcgacccggcaggcgtggccgccgccgatttgaacgaatcgctgatactgcagatagaaagattgggcgaatgtgctgccaaacccgccgccctgcatatcgtccgaaacgccctcgacagcattgacggcaaccgcagccaaaccctcgcacgaataaaaaaacacctgccccaaaccgacagcggcacactcgaagccgcactcgacctcattgcttcgctcaatccctttcccgccgccggttttgcctcgtccacgcccacgccgtattctgacgaggcgctcgccaacctgctggctttccgcggcatggaggtttctcgccgcaccattgccaaatacagagaatcctttgagattccggcagcacacaaacgcaaaaccgcagaataattgccgaataatcttataaagacaacaaaccaaaagccggcatttctgcgaaagcgggaatgccgaatccgtccgcgcggaaacctgcatcccgtcattcccgcgaaagagggaatctagaaacgcaaagctgcaagagtttatcggaaatgaccgaaactcaacgaacctggattcccgctttcgcgggaatgacgggggtttggcgggaatgacgagggtttgggatttctgtttttgaatttctgtttttgtgagaatggcaagattttcggttcttgtatggataacgagattttagatggcgggaatttgtcgggaaaacagcaatctgagacctttgcaaaaataatctgttaacgaaatttgacgcataaaaatgcgccaaaaaattttcaattgcctaaaaccttcctaatattgagcaaaaagtaggagaaatcagaaaagttttgcattttgaaaatgagattgagcataaaattttagtaacctatgttattgcaaaggtctcaatctttaccgtcattcccacgaaagtgggaatctagaaacgcaaagttgcaagaatttatcggaaatgaccgaaactcaacgaacctggattcccgctttcgcgggaatgacgagggtttgggatttctgtttttgaatttctgtttttgtgagaatggcaagattttcggttcttgtatggataacgagattttagatggcgggaatttgtcaggaaaacagcaaccctccgccgtcattcccacgaaagtgggaatctagaaacgcaaagttgcaagaatttatcggaaatgaccgaaactaaacgaacctgaattcccgctttcgagggaatgacgggggtgtggcgggaatgacgggggtttatcagaaatgaccgaaactcaaaagcgggcagccttgtttacgccttcaaaatatcgagcaatttcaaatcgactttttcggcatcgaatttatctttggcaatcgcataacttgcattccccatcaggcggacggcttccctgttttcgataaaataaatcattttttcggccaagatgcggggattccaaggctcgatcaggaagccgttgaccttgtcggcgaccgtttccctgcatccggggacatccgtcgtaatcactgccctgccgacggccattgcctcctgagtgcttcggggaacgccttccctataataagacggcaatacgaatatatgatgttcttttatcacttcggaaacattgttcacaaaaccggggaaacggataatatcgcgggcggcaagccgttccaaatcgcccccccccccgcgtgatttgtcgattgcgcccaaagcggtaaaaaccgtatcggggtatttgtccttaacctgttccgccgcccgaataaaatcatcaatccccttttctttcagaaatctgccgataaagaggaattttacgggttctttttcatcgggaatatccgcctcggaataaggatattgccgcaaatccagaccgattccgcccaaaatatggatgttttttattttgatgccgtatttgtccgtcagttcgtctttgtcgtcggggtttaatacaatcaggctttccaacatcggcagggcaatgcggtataaggcaatcaaaatcccctttatgatttttgtttttaacggtatgccttccggctgcggggtaaatgcgaatcccaaaccttccagcatcccgacgattctgggcacgcctgccagttttgcggcaaaagtgccgaaaatcacgggttttgcgaaataagggaaaaccaaatccggcgatatttttttgagttctttaaagatgaggaaggtggattttatatccgaaaacgggttcagcccgctgcggtttgaacggtaggtaacgggtgtaacccccatttccctgataatatccaattcattgtcggaaaactccgatacaaaggcatacacctgatggtttttgccgattaattttttaatgacgggggcgcggaaaccgtaaatgctggatgcgactgttgtgataaaaacgattttcataaggcggacaccttgaatatggattggaaatgcggtctgctacggcagggtttcatcctgtaacccagcaaggcttgggtttgcctgcgtattatagtggattaacaaaaaccggtacggcgttgccccgccttagctcaaagagaacgattctctaaggtgctgaagcaccaagtgaatcggttccgtactatttgtactgtctgcggctcgccgccttgtcctgatttttgttaatcactataaaaatgccgtctgaaacggtttcagacggcatttcgatgtcggcggcggctttgcggaatcagcctttgaagcgtttgaagaccagcgtgccgttggtgccgccgaagccgaaggagttggaaatggcaacgtcgatttccgcgtcgcgcgcttcgttggcgcagtagtccaaatcgcagccggcttcaacgtcttgttcaaaaatgttgatggtcggcgggattttgccgtcgtgtatcgccaaaatgctgtacacggcctccacgccgcccgccgcgccgagcaggtggccggtcatggatttggtcgagctgacgacggttttgtaggcgtgttcgccgaacgcgcgtttgagggctttggtttcgttggcatcgcccaagggggtggacgtgccgtgcgcgttgacgtaatccacgtcttcgggattgatgccggcatctttcagcgcgcgggtaacggcaagggcggggccttcttcgttcggcgcggtgatatggtaagcatcggaactcatgccgaagccgacgatttcggcgtagattttcgcgccgcgttttttggcgtgttccaattcttccaacaccaatatgcccgcgccttcgccgataacgaagccgtcgcggcctttgtcccacggacgggaagcggtggcggggtcgtcgttgcgggtggagagggctttcatcgcggcaaaaccgcccacgcccaaagtgctgattgcgccttccgcgccgccggcaaccattatgtccgcgtcgccgtatttaatcatacggagggaatcgccgatggcgtgcgcgccggtggtgcaggcggaaaccatcccgtagctcgggccgcggtagcctttgaggatggtaacgtgtccggaaatcagattaatcagagaaccggggataaagaaagggttgattttgcgcgcgccgccttcgattacggctttgccggtgacctcgatgccgggcagtccgccgatgccggaaccgatgttcacgccgatgcggtctttgtcgaggttttccacatcgtccaaacccgaatcggcgattgcctgcaatgcggcggcaatgccgtagtggatgaatacgtccatccggcgcgcttctttcgcgctgatgtattgtccgatgtcgaaaccgcgcacctcgccggcgacacggctgttgatgtcggatgtgtcaaagcgggtaatcgcgccgatgccgcttttgccggtgagcagggtgtcccaagcctctgcgacagtgttgccgacaggggaaacctgacctaagcctgtaatgactactcttctctgactcatgataacctcgctgttggttgtcggaatgggggcatatgcggctgtcgtgcagatgccgtctgtaatttgcggcaggggttcaaacagtttgccatataagggaaaagcctctattgcgcggtgcagcagaggctgttgtgtcgggcgacgaccggttagccgttgtgggcattgatgtagtcgatagccagttggacggtggtgattttttcggcatcttcgtcggggatttcgcagccgaatgcttcttccaaagccataaccagctccacggtgtccaaagaatccgcgcccaagtcgtcttggaaggaagattcgtttttcacgtcggcttcgtttacgcccagttgttcagcaacaatttttttaacttgttgttcgatgtttgacatatcagtcgttcctttatgccttgcggcaggttgtttaagggaaataaatcggtggtattgtaccgacttttaatagagttttctatctaatgactattatatcaatatttgccgatttgtacatttttgggtgcggcgggttttgtcgttcaagtttgacctgtgtgccgtatgtttggcgggatttcggttaaaatggcggcatttccatctgaagcagaaagccctgtcatgtatccacttgcccgtcgcatcctgtttgcactcgatgccgaaaaagcccaccacttcacgctcgacgcgctctacacggtttataaattgggtttgattcctgtaaccgacaaccgtaccaaacctgtaaaattgatgggtatggatttgcccaaccctgtcggacttgccgccggactcgacaaaaacggcgaatacatcgacgcattgggcgcgctcggctttggtttcatcgaaatcggcacggtaacgcccaacccgcagcccggcaacccgcagccgcgcctctttcgcgttcccgaacaccaaggcatcatcaaccgcatgggtttcaacaaccacggtatcgacaccatgatacgcaacatcgaaaaaagtaaattcagtggcgtattgggcatcaacatcggtaaaaacgcggttacacccatcgaaaacgctgccgatgattatttaatctgccttgaaaaagcctacgcacacgcaagttacattaccgtcaatatttcctcgcccaacactaaaaacctccgcgcgctgcaaggtggcgacgagttgagcgcattgcttgaggctttgaaaaacaaacaggcacagcttgcctctgtacacgggaaatacgtcccgctcgccgtcaaaatcgcccccgatttggatgaagcacaaatcgaagacatcgcccacgttgtcaaatccgtcgaaatggacggcatcatcgctaccaataccaccatcgacaaatcaagtctcggcagccatccgctcgcaggcgagcagggcggtttgagcgggctgcccgttcatgaaaaaagtaatcgggtgttgaagctgttggcagaccacatagacggcaagctgccgattatcggcgtaggcggcattatggaaggcgaggactcggcagataaaatccgcttgggcgcgaccgccgtccaagtgtacagcggattgatatacaaaggtccggcattggtcaaagaatgtttgaaggctttggcgcgatgacgcgatccgcccaaaatgccgtctgaacgcacgttttgccgttcagacggcattttcatttcctttttccgcctgacgccccttgaaaatcccttacgcgccgccctgtttgaaataaggcaaaccgatgcgtgaacacggagcaggcaatcggagtaaaaaatgaaccttgatttaaccgcgcaaaaagtccgtctttcttggaaggatattctgtgggggtatgggaataaatacttgggttgggctgatgtggcagcttatgcccgaaaaatgacgctttcagatcatgatgaacgtgtgttcaaactatctttaatcaacaaatccaatattcttgaattaaagcctgttctggaagatttggcttcggaaatgagggattattcccctaaaaattggctgtacgtcctcttaagcgatgtattccatagaaaagaagaatttgaggatcctttgggggaagttgaaaaaatttatgcagattttgattatccggaagaaatagaatcatttgtcaggtatatgccgcccaaagacggttatattccttctgcccacacctatgaagaaaatattgcccggttatattctcactgggaacactatttgaacaacggcggagggcagggttaaaaccggcaatccgatgccgtctgaagcattatccggccttcagacggcattttgttttccgacagtttataaactgtcgttgtttcttgacagaaacaacgaccttatttgaaacgattggaggacatgattatgggtttttggaatggtgtggcaaaagcagcaaaagcagtgggagagggaatgattgaagccggcaatgagcataaggcgttgaaaatggaatatgcggagaaatcaagtgaggagctgcatgaaatcgtcaagagtgatggtttttttaaaaattccacacgggagaaaagtgcggcttatgctattttaaaagagcgtggcgaggtgtgaacaggaaacggcggcatttgccgctgttttttattggtaggcatccgtccgaatatcggggcaaggtttcagacgacatcgaaggttgctatgatatagtggcttgactttaaaccggtacggcatcccctcgccttgtcctgatttaaagttaatccactatctcattcccgtcatccttccaaacggaatccgaaatgtccgacaaccgcctcgacaccgcccgccgccattccctcttcctcgcccgccagctcgacaacggcaaactcaagcccgaaatattcctgcctatgctcgacaaggttttgaccgaagcggatttccaagcctttgccgactggggcgaaatccgcgcggaagaaaacgaggaagaattggcgcggcagttgcgcgagttgcgccgttatgtggtgtcgcagattatcgtgcgcgatatcaaccgtatcagcgatttgaacgaagtaacccgcacgattacgctgtttgccgattttgccgtcaataccgcgctggattttgcctacgcctattatcgggacatgtacggcacgccgatcgggcgttataccaaatcgccgcagcatttgagcgtggtggcgatgggcaaggcgggcggctatgagttgaacgtgtcttccgacatcgatttgattttcgtctatcccgaatcaggcgacaccgacggcaggcgcgaacggggcaatcaggaatttttcaccaaagtcgggcagaaactgattgcgctgctgaacgacattaccgccgatgggcaggtgttccgcgtcgatatgcggctgcggccggacggcgattcgggcgcgttggtattgagcgaaaccgcgctggagcaatatttgattacacaggggcgagaatgggaacgctacgcgtggtgcaaaggtcgcgtggttacgccgtatccgaacgacatcaaagcactggtgcgcccctttgtgttccgcaaatatctggattacggcgcgtatgaggcgatgcgtaagctgcaccgccaaatcagcagcgaagtcagcaaaaaaggcatggcggacaacatcaaactcggcgcgggcggcatccgcgaagtcgaatttatcgcccagattttccagatgatacgcggcggacaaatgcgcgcgctgcaactgaaaggcacgcaggaaacgctgaagaagcttgccgagctgggcatcatgctgtctgaacacgtcgaaaccctgcttgccgcctaccgcttcctgcgcgatgttgaacaccgcctgcaatactgggatgaccagcaaacccaaaccctgccgacctcgcccgaacagcggcaactgctcgccgaaagcatgggtttcgacagttattccgctttttcagacggtctcaatgttcatcggaacaaagtcaatcagttgttcaacgaaattttgagcgaacccgaagagcaaacgcaagacaacagcgaatggcaatgggcatggcaggacaaacccgacgaagaagggcggcgatgccgtctgaaggcgcacgggttcgatgccgaaaccgtcgccgcaaggctcgaccaaatccgccacggccataaataccgccatctttccgcacacgcccagccgcgtttcgatgcggttgtgccgctgttcgtacaggcggcggcagcgcaaagcaacccgaccgatacattgatgcggctgttggattttctcgaaaacatcagccgccgatccgcctatctcgccttcctcaacgaacatccgcaaaccttggcgcaactggcgcagattatgggccaaagttcttgggtggcggcgtatctgaacaaatatccgattttgttggacgaactcatcagcgcgcagcttttggataccgcgtttgattggcaggcgctcgccgccgccctttcagacgacctcaaagcctgcggcggcgatactgaagcgcaaatggacaccctgcgccgcttccagcacgcccaagtcttccgtctcgccgtccaagacctcgccggactgtggacggtagaatccctctccgaccaactctccgccctcgccgacaccatcctcgccgccgccctgctgtgcgcatgggcggacatgcccaaaaaacaccgcgacacaccgcaattcgccgtcgtcggctacggcaaactcggcggtaaagaactcggctacgcctccgacctcgacctcgtctatctctacgacgacccccaccccgacgcaggcgacgtgtacagccgcctcgcccgccgcctgaccaactggctttccgccgccactggcgcaggcagcctctacgaaaccgacctgcgcctgcgccctaatggcgacgccggtttcctcgcccacagcatcgccgcctttgaaaaataccagcgcgaaaacgcctggacgtgggaacaccaatcccttacccgcgcccgcttcatctgcggcacgtccgaaattcagacggccttcgaccgcatccgcaccgaaatcctcaccgccgaacgcgaccaaaccgccttggcaggcgaaatcatcgaaatgcgcgaaaaaatgttccccacccacccgcctgccgacagcaacgtcaaatacgcgcgcggtggcgtggtcgatgtcgaatttatcgtccaatatctgatacttgcccatgcccgccagtatccgcaactcttggacaactacggcaacatcgccctcttaaacatctccgccgactgcggtttgattgacaaaaccctcgccggacaaagccgcaccgcctatcgcttctaccgccggcagcagcacaacaccaaactgcgcgacgcggcaaaaaccgaagtaaccggcgaactgttggcacattacggcaatgtcaggaaattgtggcgggaagtgttcggcgaagaagcggcaaccgtctgaacaaaaaatgccgtctgaagcctgacaatctgggtttcagacggtattttcgtaccgtgccgttttaaggttgcggcagagctaaagcgatttatcgggaatggctgaaacccaaaaaccggattcctctttcgcgggaatgacgggatttcaggcttctgtttttgtgggaatgatgggattttttatccaagcaaaaatcaaaacaaacaaataagaaccgtttaaaaccccgccgtttccattaaaatagcgcattctactttttagacggccttggattcggatttcaagtgcaacactagtgtattagtggttggaacagattcaagaataaaacacttggcgtttcgtagccaagtgtttttcttggtcggtggttcaactcatcttgaaccctgcgtatctcccgatcactgatgttacggaaatcggtttgtttggggaagtattgccggatgagtccgttggtgttctcattcagccctttctcccaagaatggtaagggcgacaaaaataagtctccgctttcaatgctttggttattttggtgtgttggtagaactctttgccgttatccatggtaatggtgtgcaccctgtctttatgtgcctttaatgccctaacagctgcccgggcagtgtcttcggctttgaggctatccaatttgcagatgatggtgtagcgggtaacgcgttcgaccaaggtcaataatgcgcttttctgtcctttgccgacaatggtgtcggcttcccaatcgccgatacgggatttctggtcgacgatagcgggtcggttttctatgccgacacggttgggtactttgcctctggtccatgtgctgccgtagcgtttgcggtagggtttgctgcatattctgagatgttgccacaacgtgctgccgttgcttttgtcttggcgaaggtagcggtaaatggtgctgtggtggagcgtgatctggtggtgtttgcacaggtaggcgcatacttgttcgggactgagtttgcggcggataaagggtgtcgatgtgctgaatcagctgcgaatcgagcttatagggttgtcgcttacgctgtttgatagtctggctttgccgctgggctttttcggcgctgtattgctgcccttgggtgcggtgccgtctgatttcgcggctgatggtgcttttgtggcggttcagctgtttggcgatttcggtgacggtgcagtggcgggacaggtattggatgtggtatcgttcgccttgggtcagttgcgtgtagctcatggcaatctttcttgcaggaaaggccgtatgctaccgcatactggcctttttctgttagggaaagttgcacttcaaatgcgaatccgccgacctctttcagttacagcagcttgatccctttcccttatccaacgggggaaggctaggatagggtggcttgcaaatatacagaacaagggacaagagccaccctctctccaaccctctccctccgtacgggagggggtggattctcgcgggcgaagcccacgctacggttagcctttaccccagcacaaacaattcccgcccgtgcgccttcagccaacttttagcattgtcggtatgcggcgtcagcgtgttcaccaaatgccaaaagcgcggactgtggtcggggtggcggaggtggcagagttcgtggatgcagacatagtcggcgacgtattcgggcgtgccgatcagccgccagttgaggcggatgccggtgtgcgggcggcatacgccccaaaaggttttggcgttgctcaggtctgtggcggtgggcgtcagtcctgtttcggctgcgtgtttttcaaggcggggcagcaggtattcgcgggcgcgttcgttcaacaggcggcgcaggtggtcgatttgtgcggcggtttcttttcggggaagcaggatttcagacgacgtgatacggatatggctttggctgtgggtatccagcttggtctttattccccgataccaaatccactcgggtaagtttgggtgggaaacaggatgcacgggcgttttggcaagcgtgttccgcaaaatcgtttcgtttgccgccagccagtttgctaacgcgtggtcttgaaaaaagggtgggacgttgatgctgaccgtctgcatattgacggggcgcagaatcagatttttcttggcactgcgtttgagttcgatttcgatgcacaaaccgtcggaaagagtataggtgaagcgtttcatagttgtgaataggtttcagaccggatacatcgtctgaaacaggaattttccatatcaggcggcaaacttcggataatatacaaaatcaaacatctgcgctacaaggttcagccgaacaagccgccgatatatttgctgatggtgatggcgctgagtactgccatcaaaccgaccacaatcacgccggaaacggtgagccacagcgggtgtttgtagtcgccgacaattttggttttgtaggcggcaatcagaatcagaccgagggaaatcggtaaaatcaggccgtttaatgcgcctacgaacaccagcacctgcgccggtttgccgatggtggaaaatacggcggtggacacggcgataaaggcaataatccatttgtttttattgcgttcgatagacgggctgagaccggagaagaacgacaccgaagtataagccgcaccaatcaccgaagtaatcgaagccgcccaaatcaccacgccgaaaatcagcaggccgatgtatcccgccgcatattcaaacggtgtggaagcagggttgtcgggattgagctgtacgccttggctgaccacgcccaaaaccgccaaaaacaatacaatccgcataatcgaggcaatcaggatcgcccgcaccgagctttggctcacttccggcaacgccgatttgcctttgatacctgcgtccagcagacggtgcgcaccggcgaaggtgatgtagccgccgaccgtgccgcccaccagtgtaacaatcgccattgcatcgagtttttccggcataaaggtatgcacggcggcatctgccagcggcggattcgcctgccatgccacataaaccgtcagcgcaatcattacgaaacccatcacttgggcgaatttgtccatcactttgcctgcttctttaaacagaaacacaccgatggcaatcacgccgctgatcacggcaccggtttccggtgacagtccggtcagcaggttcagacccaagcctgcgccgccgacgttgccaatattgaacgccaaaccgcccatcacaatcagcacagccaagaaatagcctgcgccgggcaagacctgattggcaatatcctgcgcctgtttttcggaaacggcgacaatccgccaaatattgagctgcgccccgatgtcgagcagaatcgagagcagaatcacaaagccgaaacttgccgccagtgcttgggtgaaggtggcggtttgggtcagaaagcccgggccgatggcggaagtcgccatcaggaatgcagcgccgattaaggcatttctgcggtttttttgatcagacataatcgcttatcctctataaaattggttgttgctgtgtttgggcgaaacctgcggttttagctacgcagaaactcgctttgctcgttttggcgaaacctgcggttttcagacggcctatgaactgtttttcaagcagaaactttgatgcctgccgccagtagttcctgccggattttttcggcaaacaccacggcgtgcggcccgtctccgtgcagacagatgctgtcggcttgcacggcaaccaggctgccgtccactgctttgacctgcccgtcccgcaccatctgcaatacttgggcgatggcttcttcgtcgctgtccacctgcgcatcggggcggctgcggggaaccagcgtaccgtcgggcatatagcggcggtcggcgaatacttcggaaatcacacccaagcctgcggcttttccggcttccaagagcaggctgccggaaagtgccatcaatttcaatttcgggtcgaaatccgccacaattcgggcaacggtatccgccagcgcacggtttttcgccgcttgattgtacattgcgccgtgcggtttgacataagccatttccaaaccctgatcacggcacaaggcctgcaatgcgcccaactggtaattcagacacgcccgcaaatcggcttcggacagattcatttcggtacggccgaagttttcccgatcgggatagccggggtgtgctccgatgcgcacgccgttttgttgggcatacgccaatgccgcccgaatatcggcaatgctgccggcgtgttgggcgcaggcgatgttggccgaagtaatcagctgcaacaaggcttcgtcgctgccgcagccttcggcgagatcggcgtttaaatcaacctgcttcatgggtgattctccgtatttggttcagataggcttgtttttgcgccgcagggcggtggcttctttcaagccgattattttgaatttgactttgctgccgaagcgcacctgtgccagcctgcccaaatcggcggcggcaacggtagcgattttcggataaccgccggtggtttgcgcatcggccagcaggataatcggtttgccgccgggcggcacctgcacggttcctgcctgaacagcgtgggacagcatttccaaaggttgcgacagggtcagcggctgtccgtcgaagcggtagcccatgcggttgctatcgctttgcagcgtccacgtttcccgttccagattcagacgccctttttcactgaaagcggcatattccgacgaaggaacaaggtggacggtatcggtaaacggtatcggggcaatgccgactttggacaattcctgcgcacctttgccgatggggagataatcgcctttttgcagcattctgccctgatggccgccgaaaccggctttcaggtcggtgcttctcgaacccatcacttccggcacatcaaatccgcccgccacgcacacatagccgtacatgccctgcacggcacgcaccagtttcaaggtctgccctttgcgggcggtataacgccaatacgaatagaccggttcgccgtccaattccgcctgatacacggcaccggtgagacaaaacggcgtatcccgttcaaacaccagcattatcccgcccaaagcgatttcgattgcggccgtgccttcgtcgttgcccaataaaatattgcccgccgccaaagcaaccgtgtccatcgcaccggcatgaccgatgccgtaacgccggtgtccgtagcgtccggtatcctgaatatgcgccggtgcctgcactgccgaaacgtgaatcatggctcaatcctttctgcaacaaagcggacttggtcacccgccgccagcagggtcggcggattcaaatcggctcggaacaagggtaattcggttctgccgataatctgccagccgccgggcgaagcgaacggatacacaccggtctgactgccgccgataccgaccgaaccggcaggaacggacgttctcggcacggcacggcggggcgtgtgcaatgcttcgggcaagccgcccagataagggaaaccgggctggaagcccatcataaatacggtataagtttgcgccgtatggcggcggacgatttcggaaataaccgtctgatggaaagcagcgacttccgccaaatccgggccgtattcgccgccgtagcagacgggaatttccaccagtttgccctgatggtctgtaacggcggtgtgttcccacacatattgcaattcatcggcaagcgtcgccaaatcggtatcgaaacgggtaaacacggtcagattgttcatgccgaccaccacttcctcaatcctgtcgtgctgcccgagcgcagcggcaaacgcccacaacttttgctgtttgcccagttcggaaggcgcattcagtcggtagaccaaagcggattcgctgattggtgtgatctctattctcatttgttgttcattttggttatgttttaatgaatctatatgcaggggcggcggtttgtcaatatcttctgtgctgcatcatcaaaccgtcgattggaaaagtgctgccctgccgctgcactttttcagacgaccttaaaccgtttctattaaaatagcgcattccacttttcagacggcatccttatgtttcccgaccaatccgcccccaacctgctgcaaggcttgaatcccgaacaactctccgccgtaacctggccgccgcaatccgcacttgtgctggcgggcgcgggcagcggcaaaacgcgcgtgctgaccacgcgcatcgcatggctgttgcaaagcggacaagccagcgtgcacagcattatggcggtaacgtttaccaacaaagccgccaaagaaatgcaaacccgtttgggcgcgatgattcccatcaatgtccgcgccatgtggctcggcacgttccacggtctctgccaccgctttttgcgcctgcaccaccgcgacgccggtctgccgtcttcctttcaaatcctcgacggcggcgaccagctttccctcatcaaacgcctgctcaaaagcctcaacatcgccgaagaaatcatcgcgccgcgttcgctgcaaggctttatcaacgcgcaaaaagaatccggtttgcgcgcttccgtgttgagcgcgcccgatccgcacacacgccgcatgattgagtgctacgccgaatacgacaaaatctgccaacgcgaaggcgtggtcgattttgccgaactcatgctccgcagctacgaaatgctgcaaaacaacgaaatcctgcgccagcactaccaaaaccgcttcaaccacattctcgttgacgagttccaagacaccaacaaactgcaatatgcttggctgaaactgattgccggcaaccacgcagcagtatttgccgtcggcgacgacgaccaaagcatttaccgtttccgtggcgcaagcgtcggcaacatgaccgcgctgatggaagaattccacatcgacgcgcccgtcaaactcgaacaaaactaccgctccgtcggcaacatccttgccgccgccaatgccgtgattgaaaacaacgacgaacgactcggcaaaaacctgcgcaccgacgccgaagcaggcgacaaaatccgctactactccgcctttaccgacctcgaagaagcccggttcatcttggacgaaaccaaagccctcgaacgcgaaggctgggatttggacgaaatcgccgtcctctaccgtagcaacgcccaatcccgcgttatcgaacaaagcctgttccgcagcggcattccctacaaaatctacggcggcttgcgtttttacgaacgccaagaaatcaaacacgcgctcgcctacctgcgcctcgccgtcaatcccgacgacgacaacgccctcttgcgtgtcatcaacttcccaccgcgcggcatcggtgcacgtaccgtcgaaaatcttcagacggcctcaaacgaacaaggcatcaccctctggcaagccgcctgcaacgccggcgcgaaagccgccaaagtcgtcgccttcgtccgcctgattgaagccctgcgcaaccaagtcggacaactgtccctgtccgaaatcatcgtcggcatcctcaaagacagtggcttgaccgaacactaccgcacccaaaaaggcgacaaccaagaccgtctcgacaaccttgacgaactcgtcaacgccgccatcgaattcaaacccgaagacagcaacttcgaaatcctgcctgaaaacatttcagacgaccccgccttccccattctcgccttcctaagcaatgccgccctcgaatccggtgaaaaccaggcaggcgcaggcgaaaaggccgtccaactcatgaccgtccacgccgccaaaggcttggaatttaacgccgtcttcctcaccggcatggaagaaggccgcttccccagcgaaatgagccttgccgaacgcggcggcctcgaagaagaacgccgcctcatgtacgtcgccatcacccgcgcccgcaaacgcctctacatcaccatggcgcaacaacgcatgctgcacggacaaacccaattcggcatcgtctcccgcttcgtcgaagagatcccacccgaagtattgcactacctgtccgtcaaaaagcctgcctacgacagttacggcaacacgcgccaaaccgccgcatccaaagataaaatcatcgacgactacaaacagccccaaacctacgcaggtttccgtatcggacaaaacgtccgccacgccaaattcggcaccggcgtgattatcgatgccgcagataaaggcgaatccgcccgactgaccatcaatttcggcaaacagggcgtgaaagagttggacaccaagtttgcgaaattggaagagatgtaaatttgaaatgtaggtcggatattcgtatccgacctacggcaaaaaccttagcaggagagaatagaaacccgtagcgtgggctttttctatgaatcaagcccaaaatttcagacggcatttttagccgtcattatcgtggatgaagcccacgctacaatgtacacacagagcaaatagagatgtgggtcggatattcgtatccgacaaaaacatttgacgcgtctattgtttccgaaacaccgctgttggaaatgtcggatacaagaatctgacttacggcaaaaaacgtagtaaggacaaagcaaaaggccgtctgaaaacgggaagggcaattttgccgcaaccgccgccgtcattcccgcgcaggcgggaatccagacctttcggcacggaaacttatcggataaaaggtttctttagattccacgtcctagattcccgccggaacataaatgacggacggtaaaagccgggtatgaatacccaccctctgttatcactgagatcaataaggaagaacattatgtcccaagtttttaaagattttgacttgtcctccgtatggaaaactaatagttgggcagatgaaaactacaaagaagccccgtttacccctgaaattttggctgccgtagaaagtgaactgggctataaattgccgcaaagttttattgaattgatggcagtacaaaacggcggaatatttgtcaaaaactgttttccgaccacgcagagaaattcgtgggcggaaaatcatgtgcaaatttgcgaggtatcgggaatcggttttgaaaaagaagggagtttgtgcggcgcgatggggcaaaaactttggctggaagaatgggaatacccgcctatcggcgtgtattttgccaacgacccgtcaggcggtcatgccatgtttgccttagactatcgggcgtgcggcaaagacggcgagccgaaagtggtgtttgtcgaacaagaatcggattttgaaatcgtcgaacttgcccccgattttgaaacctttatccgcagcttgcggcatgaagatgagtttattgacgaagaaatataaaacggtggttgaaaaactgaaatcatcaagagaaaacgggcgaaataacgggtaatcgcttgaatccgtaaggaaaacggtttggtggaacgcgccatccaagacctttgcaaaaaactgtccccgacagcattgacattattaacagaacttatcaattttggagctatctcaaatataattcggttatcctgttgtatccattaaatcatatgcttcaattaattgttgttctagctcttataccaattttggattgcgaattcctgacacaatctcaaattcttctgcatctatgcaaacacctgcataaatttcaataacaagggaacgcaataattgaagctcttctcttgttaaagaaataataatgtcatcacctttgtaattgattatattcataataattttatttttgtttgtcaaagtaagttttgcctaaggttggtctaaatgcagttccaccatcttttgaatttgggtctctgattacaattgctccagacttatcatcccaaattgctcttatgtgtttggattgtaatcttcgaattcccaagaaaaaaatcgtaataagtttgaaagtgtcaaatcccaagtttcttttgagcaatattctaatattttatcaatttcacttttaataatcttatgatcaaactgttctaatattaatgcattagaccaaaaaaaaccttctttattacaatgatgggaaatccatttaggagaacaaatgcaaagtgaaaaaatagatgagccttgttctccttcgattccgatatccaaatctatccatctatggaaattatctggaatttcgggggtaaatttttcaaaatcaatatcatataaatttatgctttttaaatccaatttaatcattagggctgtcctagataaatagggaaattcaaattaagttagaattatccctatgagaaaaagtcgtctaagccggtataaacaaaataaactcattgagctatttgtcgcaggtgtaactgcaagaacagcaacagagcccgacagcattgtttatacggattgttatcgtagctattcatttacgcaagtttaacggcattcccaaagcgcattttgagctgtatttaaaggagtgcgaatggcgttttaacaacagtgagataaaagttcaaatttccattttaaaacaattagtaaaatcgagtttatcttagttgtccaggacagccccattatttttataacaccgtgaagccgcacagcagtttgaacagtgatacgccgtttgcgggcttacgagtttattttcccggcctgcagtttgagcaatacggtgatttcctacggttaatacaaatgtttacacattgatacatttcatttatagttccgcctatttgaaaatagaaaatatgaattcgaccgcaagtaaaaccctgaaaggattgtcgctggtgtttttcgcctctggattctgcgccctgatttaccaggtcagctggcagaggcttctattcagtcacataggtatcgatttgagttcgattactgtcattatttctgtatttatggtcggcttgggtgtaggtgcgtatttcggtggacgcattgctgaccgttttccttcaagtatcatccccctgttttgcatcgctgaagtatccatcggtctgttcggtttggtaagcaggggtctgatttccggcttggggcatcttttagttgaggctgatttgcccatcatcgctgctgccaatttcctcttattgctgcttcctacctttatgatgggcgcgaccttgcccttgctgacctgtttttttaaccggaaaatacataatgttggcgagtctatcggtaccttatattttttcaacactttgggtgcggcactcggatcgcttgccgccgccgaatttttctacgtcttttttaccctctcccaaaccattgcgctgacagcctgctttaaccttctgattgctgcttcagtatggctgcgttacagaaaggatggatatagtgaacactaaaccgaatactagtttgatttatatgctttctttccttagcggcttattgagcttgggtatagaagtcttgtgggtgaggatgttttcgttcgcagcacagtccgtgcctcaggcattttcatttacccttgcctgttttctgaccggtatcgccgtcggcgcgtattttggcaaacggatttgccgcagccgctttgttgatattccctttatcgggcagtgcttcttgtgggcgggtattgccgactttttgattttgggtgctgcgtggttgttgacgggtttttccggcttcgtccaccacgccggtatcttcattaccctgtctgccgtcgtcagagggttgattttcccgctcgtacaccatgtgggtacggatggcaacaaatccggacgacaggtttccaatgtttatttcgccaacgttgccggcagtgcattgggtccggtccttatcggctttgtgatacttgatttcttgtccacccaacagatttacctgctcatctgtttgatttctgctgctgtccctttgttttgtacactgttccaaaaaagtctccgactgaatgcagtgtcggtagcagtttccctaatgttcggcatcctcatgttcctactgccggattctgtctttcaaaatattgctgaccgtccggataggctgattgaaaacaaacacggcattgttgcggtttaccatagagatggtgataaggttgtttatggggcgaatgtatacgacggcgcatacaataccgatgtattcaatagtgtcaacggcatcgaacgtgcctatctgctaccctccctgaagtctggcatacgccgcattttcgtcgttggactgagtacaggttcgtgggcgcgcgtcttgtctgccattccggaaatgcagtcgatgatcgttgcggaaatcaatccggcataccgtagccttatcgcggacgagccgcaaatcgccccgcttttgcaggacaaacgtgttgaaattgtattggatgacggtaggaaatggctgcgtcgccatcctgatgaaaaattcgacctgattttgatgaatacgacttggtactggcgtgcctattccaccaacctgttgagtgcggaatttttaaaacaggtgcaaagccaccttaccccggatggtattgtaatgtttaataccacgcacagcccgcatgcttttgctaccgccgtacacagtattccctatgcataccgctatgggcatatggtagtcggctcggcaaccccggtagttttccctaataaagaactgctcaagcaacgtctctcccggttgatttggccggaaagcggcaggcacgtatttgacagcagcaccgtggatgctgcagcacaaaaggttgtctctcgtatgctgattcagatgacggaaccttcggctggggcggaagttattaccgacgataatatgattgtagaatacaaatacggcagagggatttaaccgtcttaaagggtttcaggcaacgcaggttttaggtaacgtcctgctagttcaaaaaaaccgcatcacagcagtcgggacaaaatggtttaaacattttgtcccgaattcttattcctatatatagtggattaacaaaaatcaggacaaggcgacgaagccgcagacagtacaaatagtacggaaccgattcacttggtgcttgagcaccttagagaatcgttctctttgagctaaggcgaggcaacgccgtactggtttttgttaatccactataccacgaattacggtgtaaaaatttatatgaccttataaaatcaaataagaatcgttatcataacatgattgtatttattgggtttttttgggcgttttgccgatatttaccttttaatggtttttgaaattcgctaaaatacgaaattattgtagaaattttgttaacggatttgggtgtaaccatgttgtccgcttactttcccgtctttgtctttatcctcatcggcctcgcggccggcgtgctgtttatcctgctcggcacgattttaggcccgaaacgccactatgccgaaaaagacgcgccttacgaatgcggttttgaagcttttgaaaacgccaggatgaagttcgacgtgcgctattacctcgtcgccatcctcttcatcctgtttgatttggaggtcgcgtttatgctgccgtgggcagtcgtgttcaaagatttgggcgcgtacggcttctggtctatgctggtgtttatcgttgttctgacggtaggctttgtttacgaatggaaaaaaggtgcgctggaatgggaatagaaggcgttttgaaaaaaggtttcatcaccaccagcgcggatacggtgctgaactatatgcgtaccggttcgttgtggccggttactttcggcttggcctgctgcgccgtggaaatgatgcacgcgggtatggcgcgttacgaccttgaccgtttcggtattattttccgtccgtccccccgtcaggccgacctgatgattgtggcgggtacgctcaccaataaaatggcgcccgccctgcgccgagtgtacgaccagctcgccgagccgcgctgggtattgtctatgggctcatgtgccaacggcggcggctattatcactattcttattccgttgtgcgcggtgccgaccgcgtcgtgccggtagatgtttatgtgccgggttgtccgccgactgcggaagccctgatttacggcctgattcagctccaacaaaaaatcaagcgcacttccaccattgcgcgtgacgagtaaggagaggacgatatggcaagcattcaagacttatacgaaaccgtcagccgcgttttgggcaatcaggcaggcaaagtcatttccgctttgggcgagattaccgtcgagtgtctgcccgagcactatatttcagtcatgaccgcattgcgtgaccatgaagagttgcatttcgagcttctggttgacttgtgcggtgtcgattacagcacttacaaaaacgaagcatggcagggcaaacgctttgccgtcgtcagtcagttgctttccgttaaaaacaatcaacgcatccgcgtgcgcgtctgggtttcagacgacgacttccccgtagtcgaatctgtagtcgatatttacaacagcgcggattggtacgaacgcgaagccttcgatatgtacggcatcatgttcaacaaccatccggacttgcgccgcatcctgaccgattacggcttcgtcggacatccgttccgcaaagacttcccgatttccggctatgtggaaatgcgttacgacgaagagcaaaaacgcgtgatttaccaacctgttaccattgagccgcgcgagatcacgccgcgtatcgtccgtgaggagaactacggtggccaataaattaagaaactacaccatcaacttcggcccgcaacaccctgcggcgcacggcgtattgcgtatgattttggagctggacggcgaacaaatcgtccgtgccgacccgcatatcggcctcttgcaccgaggtaccgaaaaactggcggaaaccaaaacctatctgcaagccctgccctatatggaccgcttggactatgtttccatgatggtcaatgagcaggcgtattgtttggcagtagaaaaacttgtcggtatcgatgtgcccatccgcgcccaatacatccgcgtgatgtttgccgaagtaacgcgcatcctcaatcacttgatgggcatcggttcgcatgccttcgacatcggcgcgatgaccgccattctttacgccttccgcgaccgcgaagagctgatggacttgtacgaagccgtgtccggcgcgcgtatgcacgccgcctacttccgtcccggcggcgtttaccgcgacctgcccgactttatgcccaaatacgagggcagcaaattccgcaatgccaaagtattgaagcagctcaacgaatcccgcgaaggcaccatgctcgactttatcgatgccttctgcgaacgcttccccaaaaatatcgacacactcgaaaccctcctgaccgacaaccgtatttggaaacagcgtaccgtcggcatcggcgtcgtctcccccgaacgtgccatgcaaaaaggctttaccggcgtgatgttgcgcggttcgggcgtggaatgggacgtgcgtaagacacagccttacgaagtgtacgacaaaatggatttcgacatccctgtcggcgtgaacggcgactgctacgaccgctacctctgccgtatggaagaaatgcgtcaatccgtacgcatcatcaaacaatgttccgagtggttgcgtgtcaatccgggtccggtcattaccacaaaccacaaattcgctccgcccaaacgtaccgaaatgaaaacaggtatggaagacctgattcaccatttcaaactctttaccgagggtatgcacgttcccgagggcgagacctacaccgctgtcgaacatccgaaaggcgagttcggcgtttacatcatttcagacggcgcaaacaaaccctaccgcctgaaaatccgcgcacccggcttcgcccatctgcaaggcatggacgaaatggcaaaaggccacatgctcgccgacgtcgttgccatcatcggtacgcaggacatcgtattcggggaggttgaccgataatgttatccgcagaatctttaaaacaaatcgacatcgagttggcaaaatatcctgccgaccaacgccgctccgcgattatgggcgcattgcgtattgcccaaaccgaaaaaggctggcttgctcccgagaccatcgcttttgtcgccgactacatcggcatcacgcctgcacaagcctacgaagtcgccactttctacaatatgtacgaccttgagcctgtcggcaaatacaaactgaccgtttgtaccaacctgccctgcgccctgcgcggcggtatggctaccggcgaatacctcaaacaaaaactcggtatcggctacggcgaaactacccctgacggcaagtttacccttgtcgaaggcgaatgcatgggcgcatgcggcgacgctcccgttatgctggtcaacaaccacagcatgtgcagctttatgaccgaagaagcgattgagaagaaactggcggagttggagtaggtcgtctgaaacgacgatttaaacgtaggtcggatacttgtagccgacagagtgggtaaaaaggcaaaatgtcggatttaagaatccgccctactgaaataccgaaatgccgtcattcccgcgcaggcgggaatccaccggtaagattcggtttctgaatttaataagacattgcttaccattgaggatggattcccgcctgcgcgggaatgacgacagacaagcaagtggtcgagatccaacaaaaacgattaaaggtcgtctgaaaatatcgatttgataaactagattttatttcagacgacgttacaagccggtacacaaagacatcttaaggtcgtctgaaacagcggccgcaaccgatacgaaaacaaacaggcacaccaaaaatggctatttaccaatcaggcgtgatttttgaccaagtggataccgccaatcccgattgctggacattggacgaatacgtcaaacgcggcggctataccgccctgcgtaaaattctgtccgaaaacatctcgcaaaccgatgtgattgacgaagtcaaaacctccggtttgcgcgggcgcggcggtgcgggcttcccgaccggtttgaaatggagctttatgccccgttctttcccgggcgaaaaatatgtggtttgcaacaccgacgaaggcgaaccaggtacgtttaaagaccgcgacatcatcatgttcaatccgcatgccctgatcgaaggcatgattatcgccggttacgcgatgggcgcgaaagccggttacaactatatccacggcgaaatttttgaaggctaccaacgctttgaggccgctttggagcaggcgcgtgccgcaggctttttgggtaaaaatattttgggttcggattttgaatttgaactcttcgcccaccacggctacggcgcatatatttgcggcgaggaaaccgcattgctcgaatcgctggaaggcaaaaaaggccagccgcgctttaagccgccattccctgcttcgttcggcctgtacggcaaaccgactaccatcaacaatactgaaacgttctcctccgttccattcattatccgtgacggtggacaggcatttgccgataaaggtattccgaatgcaggcggtaccaaattattctgtatttccggccatgtcgagcgtccgggcaactatgaagtgccattgggtacgccgtttgccgaagtcttgaaaatggcgggcggtatgcgcggcggtaaaaaactcaaagccgtcattcccggcggttcgtccgcgcccgtattgcctgccgacatcatgatgcagaccaatatggactacgactcgatctccaaagcaggctccatgctcggttccggcgcgattatcgtcatggacgaagacgtgtgcatggtcaaagcccttgagcgtttgagctacttctactacgacgagtcttgcggccaatgtaccccctgccgagaaggtacgggctggctttaccgcatcgtccaccgcatcgtagaaggcaaaggtaaaatggaagatttggatttgctggattccgtcggcaaccaaatggcaggccgcaccatctgcgccctcgccgatgctgccgtcttccccgtccgcagctttaccaagcatttccgtgatgagtttgtgcattacatcgaacacggcgggccgatgaaagagcataagtggggagggtggtaatggtggaagctaaaatttttattctatacggtgcagccaacaaaggtaagagtacgacactcaatacgctttttaatcagatttgtcggaaattttctaaatttctagtcttttttgaaagacatggaaacggcttagattttgttgcagtatttgatcatgaaggtcagagaattggtttttattcatctggtgataatgaatacgaggttaggggaaatttatacaaactttattcgcataattgtgattttatttttggcacgtcaaggacacggggtggtagttgcgatgcagtaggatgttatgcagagttattgcatggcgatgtaaatataattaattggtgtgaaaagtttgagcctacagatgaagacaatgagcgtgctgttaaagagttatttaagtcatttaaaaatataataaatgagttatagttttagttggttttatattggttaaaagcaaaatgctaaaaatttaactttgccgtcattcccgcgtaggcgggaatccatagtggaatttacagaacccgatatttgaaaagcagttgccgaaattcaaaaaatggattcccgcctacgcgggaatgacggcgggagtaggcagatgttttcagatgaaaacggttgtaaatgatattaaaaaagttgttgtttatattgcaggaaaaatgaatacgaaaccatccgcttactagacaacctgccgtatatattttggcaaacggtaaaaatggaacactctatatcggtgttaccatgaatttgccggaaagggtttggcagcacaaaaaccatgtcaatattgatggctttactgcccgatatgatgtgcatgatttagtttggtatcagttttttgagaatatgcctgaagcagttgccaaagaaaaaacgatgaaaaaatggcgacgtgaatggaagattaaactgattgaagaacaaaatactgaatgattggacttgtcgggcgtgttgtttgtttagttttatttctggaactttaaaaactgtcgttattccagccccacctacgcgcagacaggctacggcgggaatcaccgcaaaagttaagaaaccaatgtttgaaaacagttaccgaaaacccaagaatggattcacgcctgtgcgggaatgacggcaaggtggcagtaaacgttttaaacagtattgattgtcaatgaaactcaaaaggccgtctgaaacccatttttcagacgacctccataaaagattatttatcaaatacccgtaactaggaacgaaccatgttacaaatcgaaatcgacggcaaacaagtatctgtggagcagggcgcgacggtgattgaagccgcgcacaagctcggtacttatattccgcatttctgttaccacaaaaaactttccatcgccgccaactgccgtatgtgtctggtgaacgtagaaaaagccccaaaacccctgcctgcctgtgccacgccggttacagacggcatgattgtgcgtacgcattcggcaaaagcccgagaggcgcaggaaggcgtgatggagttcctgctcatcaaccatccgcttgattgtccgacctgcgaccaaggcggcgaatgccagttgcaggatttggcggtgggctacggcaaaaccaccagccgctacaccgaagaaaaacgttccgtcgtcggcaaagatatggggtccttggtttccgccgaggaaatgagccgctgtatccactgcacccgctgcgttcgtttcactgaagaaatcgccggtttgcaggaaattgcgatggtgaatcgcggcgaacactccgaaatcatgccctttatcggcaaaacggtggaaaccgaattgtcgggcaacgtcattgatttgtgtcccgtcggcgcgctgaccagcaaaccgttccgcttcaacgcgcgtacttgggaattgaaccgccgcaaatccgtttccgcccacgatgctttgggcagcaacctgattgtgcagaccaaagaccataccgtccgccgcgtgttgccgttggaaaacgaagcgattaacgaatgctggctgtctgaccgcgaccgtttcgcctacgaaggcctgtatcacgaaagccgtctgaaaaacccgaaaatcaaacagggcggcgagtggatggacgtggattggaaaaccgcgttggaatatgtccgcagcgcgattgaatgtatcgccaaagacggcaagcaaaaccaagtcggcgtttgggcgaacccgatgaatacggttgaagaactgtatctggcgaagaaactcgccgacggcttgggtgttaaaaactttgcaacccgtttgcgccaacaagacaaacgtctttcagacggccttaaaggtgcgcaatggttgggacaaagcattgaatctttggctgacaacgatgccgtattggtagtcggtgcgaacttgcgcaaagaacagccgctcctgactgcccgcctgcgccgcgccgccaaagaccgtatggcattgagcgtattggccagcagtaaagaagaattgtttatgccgcttctgtctcaagaagccgcacatcccgacgagtgggcaggccgtctgaaaaacctgtctgtcaatgcggaacacgccgttaccgccagcctgaaaaatgctgaaaaagcagcggtgattttgggcgcggaagtgcaaaaccatcctgattacgccgcggtttacgccgccgcgcaagagctggctgacgcgaccggcgcagtgctgggcattttgccgcaagccgccaacagcgttggtgcggatgtcttgaatgtaaactccggcaagagcgttgtcgaaatggtaaacgcgccgaaacaggcagtcttgctgctcaacgttgagcctgaaatcgatacggcggacggtgcaaaagccgtagccgcgttgaaacaggcaaaaagcgtgatggcgtttacgccgtttgtcagcgaaacgctgctggacgtgtgcgacgtgttgttgccgattgcaccgtttaccgaaacctcaggcagcttcatcaatatggaaggccgtctgcaatccttccacggcgtggtacaaggcttcggcgattcgcgtccgctgtggaaagtgttgcgcgtattgggcaacctgtttgacctgaaaggttttgaataccacgataccgctgcgattttgaaagacgcgctggatgtggaaagcctgccgtccaaactggacaaccgcaacgcatggacaggggagggcgttcagacgacctcagaccgcctcgtccgtgtcggcggcgtcggtatttatcacaccgattctatcgtgcgccgttccgcaccgttgcaagaaaccagccatgccgccgtgcctgctgcgcgtgtaaatccaaatacattggcacgcttgggcctgcaagacggacaaaccgctgtcgccaaacaaaacggcgcaagcgtatcggttgccgtcaaagccgatgccggactgcctgaaaacgtggtgcatctgccgctgcataccgaaaatgccgcgctgggtgcgttgatggacactattgaactggcgggagcttgattatgcaggaatggttccaaaacctctttgccgcaacgctcggtctgggcgatttgggtattactgtaggcttggtggtatccgtcatcgtcaaaattgtgattatcctgattccgctgattctgaccgtcgcctacctgacttatttcgaacgtaaagtcatcggcttcatgcagcttcgcgtcggtccgaacgtaaccggcccgtggggtctgattcagccgtttgccgacgtgttcaaactcttgtttaaagaagtaacccgtccgaagctgtcaaacaaagccctgttctatatcggcccgattatgtcgcttgccccgtctttcgcggcgtgggcagtgattccgttcaatgaagaatgggtgctgaccaacatcaatatcggtcttttgtacatcctgatgattacctcgctgtcggtttacggcgtgatcatcgcgggctgggcttccaactccaaatattcgttcttgggcgcaatgcgtgcttccgcgcaaagcatttcctacgaaatcgccatgagtgccgcgctggtgtgcgtcgtgatggtgtcgggcagcatgaacttctccgacatcgttgccgcgcaggcaaaaggcatcgcaggcggttcggtattctcttggaactggctgccgctcttccccatcttcatcgtctatctgatttccgccgttgccgaaaccaaccgcgcaccgtttgacgtggcagagggcgagtctgaaatcgttgccggtcaccacgtcgaatattccggcttcgcattcgcgctgttcttccttgccgaatacattttcatgattctgattgccgcgctgacatcgttgatgttcctcggcggctggctgtctcccttcccgcaaagctggggcattgtcggtacgccttccgcattttggatgttcgcgaaaatggcggcggttctgtactggtatctgtggatacgcgccaccttcccacgctaccgttacgaccaaatcatgcgcttgggctggaaagtgctgattccgatcggcttcgcctacatcgtgattttgggcgtgtggatgatttcaccgctgaatttgtggaaataagtttcagacggcatcttgaggccgtctgaacaaagcgattttgaatacctaacgaaatccctgttttgagggaacataatatggctaacttagtaaaaacctttctgcttggcgaattggtaaaaggtatgggcgtaacgctcaaaaactttttcgcccgcaaagacacaatttatttccccgaagagaaaacgccgcaatccgtgcgtttccgcggtctgcacgcgcagcggcggtatccgaacggcgaagagcggtgtatcgcgtgtaagttgtgtgaggcagtgtgtccggcaatggcgattaacatcgaatcggaagaacgtgaagacggtacgcgccgcaccaagcgttacgacatcgacctgaccaagtgcatcttctgcggtttctgcgaagaggcatgcccgactgatgcgattgtggaaacccatatttttgaataccacggcgagaaaaaaggcgacttgcacatgaccaagccgattcttttggccattggcgacaaatacgaagctgaaatcgccaaacgcaaagccgctgacgcgccgtatcgttaatgctttggggcttcttggaaggttttaaatatggaaggactgattaatgcattgaaatatttagccgaacatgagccaatagataattttgaagaaattagaactagaaatagtccgattgagttgccaagtggattaagtaattttgaacaaaatatttttttaaaagaaaatttatccccaaaattacaaaatgatgatagcttgaagacgcattattggattatccgtgaatggggtgggattaaaagttttaaacaatctgctgaaaatagccagcttattcgtcaatttttatcggaacttaattcgggaaaattgagtagtggtttgttgaaaatttcatcattatctaaattggcttcttttatagattgtgagcgattcgccatttatgattcacgcgctattttttcgttgaattggttgttgtttaaatttacaaatgcagatttgttttttcagccacaaggtagaaatagggaactagaaatccgaaatatgaacgtattgtttcatttttctgatatcaaaccgaattatcggaaaccagacgtttcgtttcatcaatattgtgggttgttacaagatttggcgaaacaagtttatggtaaacaagcaaaaccgtatcacatagaaatgttgttattcaaaattgcgacaacgtggatttgtgcggatatggatcaactgattaagtttgattgtttgcgtaaccaggattttcagactgcttgaaaccatatttttgattaataaagaaagcatagactatgactttccaactgattttattttatatttttgcagtgataattctttatggcgcgctcaaaaccgtcaccgctaaaaaccctgttcacgccgctttgcatctggtgctgaccttctgcgtgagcgcgatgctttggatgctgatgcaggctgagtttttgggcgtgacgctggtggtggtttacgtcggcgccgtgatggtgttgttcctgttcgtcgtgatgatgttgaacatcgacattgaagaaatgcgtgccggtttctggcggcacgcgcctgttgccggtgtggtcggcacattgttggcggttgcgctgatcctgattctggtcaacccgaaaaccgaccttgccgcatttggtctgatgaaagacattcctgccgattacaacaatatccgcgatttgggcagccgtatttataccgactatctgttgccgtttgaattggcggcggtattgctgttgttgggtatggtggcggcgattgcgctggttcaccgtaaaacggttaatccgaaacgcatggatcctgccgaccaagtcaaagtacgcgccgaccagggccgtatgcgtctggtgaaaatggaagcggtcaaaccgcaagtcgaatctgccgaagaaagcgaagtttcagacgacctcaagccgaaagaggagggcaaagcatgattaccttgacgcattatttggtattgggtgcgctcctgttcggtatcagcgcaatgggtatctttatgaaccgcaaaaacgtgctggtattgctgatgtcgatcgagctgatgcttttggcggtgaacttcaactttatcgccttctcgcaacatttgggcgatactgccggacaaattttcgtattcttcgtattgaccgttgccgctgccgaatctgccatcggtttggcgattatggtgctggtgtaccgcaaccgacaaacaatcaacgttgccgatttggacgagttgaaagggtaaaggtaggttgggtcgagacctgacaagacaccgatgccgtctgaaaacccgataggaaaaacgatgaaatccatagacgaacaaagcctgcataatgcccgccgcctgtttgaaagcggcgacatcgaccgtatcgaagtcggtaccaccgcgggcctgcaacagattcaccgttacctgttcggcggcttatatgattttgcgggtcaaatcagggaagacaacatttccaaaggcggttttcgttttgccaacgccatgtatttaaaagaggctttggttaaaatcgagcagatgcccgagcggacttttgaagaaatcatcgccaaatatgttgaaatgaacattgcccatccgtttttggagggtaatggcagaagtacccgcatctggctggatttggtgctgaaaaaaaacctgaaaaaagtcgtgaactggcaaaatgtaagtaaaaccctgtatttgcaggcgatggaacgcagccccgtcaacgatttagaactgcgctttctgttaaaggacaacctgactgacgatgtggacaaccgtgaaatcatctttaaaggtatcgagcagtcgtattattacgaagggtatgaaaaaggctgagggtcgtctgaaaagcgatttcagactgtttcagacgacctgattcggtaggtgatcagacgggagcggatgagaaaagaaattctgggtaagaataatccggtctgaaatattggaagaagaatgatggataaaaatcagttagaacaagaatttcataaagccatgttaaatatttatcaggaggctttgaatttgccgcaaccttacaaggcgacacgatttttacaaattgtaaatgaatttggtggtaaagaggcggcggataaattattgagtacgggggaaaagaagactcagaccggttttacagagctgattttgagtggtggcggagtccacgccttgaaatacagtatggaatatctggtgttacaaaagccgtggtgtgatttatttactgaagagcaattagctgtggcacgcaaacgattggagcgtgttggatttgtttttccgaagtaattttgtacgaaacaaacatagatttttaaatcaatcggattcaatcaaatgaacgatatgactttatatttgataattgcccttgttccgttggcaggctcgctgattgcgggtttgttcggcaacaaaatcggacgtgccggtgcgcatacggttacgatactcggcgtggcggtgtccgccgtgctgtcggcttatgtgctgtggggctttattgacggcagccgcgccaagtttgacgagaatgtctatacctggctgacaatgggcggcttggatttctccgtcggcttcttggtcgatacgatgacggcgatgatgatggtcgtggtaacgggcgtgtcgttgatggtgcatatctataccatcggctatatgcacgatgaaaaagtcggctaccaacgcttcttcagctatatttctttgtttacattcagtatgttgatgctgattatgagcaacaacttcattcagctcttcttcggttgggaagcggtgggcttggtgtcgtatctcttgatcggtttctatttcaaacgcccgagcgcgacatttgccaacctgaaagcctttttgatcaaccgtgtcggcgacttcggctttttgctcggtatcggcttggtgcttgcctatttcggcggcagcttgcgctatcaagatgtattcgcttatctgcccaacgtgcaaaatgccactatccaactgttccccggtgtggaatggtctttgattactgtaacctgtttgctcctgtttgtcggtgcgatgggtaaatcggcacaattcccgctgcacgtctggctgcctgattcgatggaaggcccgaccccgatttctgcattgattcacgccgcaaccatggttaccgccggtttgtttatggtgtcgcgtatgtcgccgatttatgaaatgagcagcaccgcgctgtcggtcattatggtgatcggcgcgattaccgccctgtttatgggctttttgggcgtgattcaaaacgacatcaaacgtgtagttgcgtattccaccctgtcgcaattgggctacatgaccgtggctctgggcgcgtctgcctattccgtggcgatgttccatgtgatgacccacgccttctttaaagccctgttgttcttggcggcaggcagcgcgattatcggtatgcaccacgaccaagacatgcgccatatgggcaatctgaaaaaatatatgccggttacttggctgaccatgctgatcggtaacttgtcgctgattggtacgccgttcttctccggcttctactccaaagattcgattatcgaagcggcgaaatacagcacactgccgggcagcggctttgcctattttgccgtcctcgccagcgtgtttgttaccgcgttttacgcgttccgccaatactttatggtgttccacggcgaagagaaatggcgcagcctgcccgaacaccattcagacggccacggcgaagaacatcacggtttgggtaaaaacgacaatccgcacgaaagcccgttggtggttaccctgcctttgattttgcttgccgttccgtccgtcatcatcggctacatcgccatcgaacccatgctctacggcgatttcttcaaagacgtgattttcgtcaacgccgacgcgcatccgactatacacatcatgaaggaagagttccacggcgcattggcaatggtgtcccacagcctgcattcgcccgtactctaccttgctatcgcaggcgtgttgagcgcatggcttttgtacgtcaaactgccgcacctgccagcgaaaattgcacagacgttccgtccgatttacgttttgtttgaaaacaaatactacctcgacgccctgtatttcaacgttttcgccaaaggcacacgcgcattgggcactttcttctggaaagtcggcgataccgccattattgacaacggtattgtcaacggctctgccaaactggtcggcgcgattgccgcgcaagtgcgtaaagcccaaaccggctttatctacacctacgccgccgctatggtgttcggcgtattggtcttgctcggcatgaccttctggggattgttccgataagaataaggtttcagacggccttaaaccttcaggccgtctgaaacgaagaaatatccacataaacacatttttattttaaccacaggttaaccactatgttttccaactacctactcagcttggcaatatggatacccatcgccgcaggcgtgctggttttggcaacggggtcggacagccgtgcgccgtttgcccgcgtgctcgccttcatgggtgcgcttgccggtttcttggtaacactgcccctgtttaccggtttcgaccgtttgagcggcggctatcaatttaccgagttccacgagtggattccgcttctgaaaatcaactacgcattgggcgtggacggtatttcagtgctctttatcatcttgaatgcgtttattacgctgttggtggtattggcaggttgggaagtcattcagaaacgtccggcgcagtatatggcggcattcctgatcatgtcgggtttgattaacggcgcgtttgccgcgcaggatgcgattctgttttatgtgttcttcgagggtatgctgattccgctgtacctgattatcggtgtatggggcggtccgcgccgcgtctatgcgtcggtcaagctcttcctctacacgctgatgggttcgctcctgatgctggttgcgatggtttacctttattatcaaacaggcagcttctctattgtcgatttccaaaacatcgaacagattccgttgggcgtacaacagcttttgtttgtggcgttcttcctgtcatttgccgtaaaagtgccgatgttccctgtgcacacttggttgccggatgcccacgttgaagcgccgaccggcggttcgatggtgttggcggccattacgctgaaactgggtgcgtatggtttcttgcgctttatcctgccgattatgccggatgcggcacgctattttgcccccgtgatcatcgtattaagtctgattgccgtgatttatatcggtatggtggctttggtgcaaaccgatatgaaaaaactggtggcgtattcgtccatcagccatatgggttttgtaacgcttgggatgtttttgtttgttgacgggcagttggacgactgggcattgaaaggtgcaatcattcaaatgatttcgcacggtttcgtgtctgccgcgatgtttatgtgtatcggcgtgatgtacgaccgcctgcacacgcgcaatattgctgattatggcggcgtggtcaatgtgatgcccaagtttgcggcgtttatgatgctgttcggtatggcgaacgcgggtttgcctgcgacttccggcttcgtgggcgagtttatggtgattatgggcgcggtcaaagtgaatttctgggtcggcgcgttggccgccatgaccctgatttacggtgcatcttataccctgtggatgtacaaacgcgttatttttggtgcgatccacaatccgcacgttgccgaaatgcaagacatcaattgccgcgaatttgcgattttggcaattttggcggtggctgttttgggtatgggcctgtatccgaacgcatttatcgaagtggtgcatcaggcggcaaacgatttgattgcccatgtggcacaaagcaagatttgaggtgtgtaaatgaactggtctgatttgaatttaatgcccgccatgcccgaaatcgtgctgctgtcgctgctggtgttattgttgctggcggacttgtgggtcagtgatgacaaacgcccgtggacgcattacggcgcgttggcaacggtggcggttacggctgtggtgcagttggcggtgtgggaacagggcagcacgtcttcgttcaacgggatgtatattgcagacggtatgtcgcgtttggcaaaaatggttttatatgccttgacctttgccctgtttgtctatgccaagccctacaaccaagtgcgcggtatttttaaaggcgagttttacaccctgtcattgtttgccctgttgggtatgagtgtgatggtgagcgcggggcattttttaactgcctatatcggtttggaactcttgtcgcttgccctttacgccctgattgccctgcgccgcgattccggctttgccgccgaagccgccttgaaatattttgttttgggcgcgctggcatccggcctgctgctctacggtatttctatggtttacggcgcaaccggttcgctggaatttgccggcgtgctcgcctcttccttcaatgaagaagccaacgaatggctgttgaaactgggtttggtgtttatcgtcgtcgccgtcgcgttcaaactcggtgcggtgccgttccatatgtgggtgcccgacgtgtatcacggcgcgcccacttctgttaccgccttggtcggcactgccccgaaaatcgccgccgtcgttttcactttccgcatcctcgttaccgggctgggaaccgtgcatcatgactggtctctgatgtttgccctgcttgccgccgcctcgctgctggtcggcaaccttgccgccatcatgcagaccaatatcaaacgtatgttcgcctattccaccgtatcgcatatgggtttcatcctgttggcgtttatggcgggcgcggtcggctttgcggcgggcctctattacgccattacctacgcgctgatggcggcggcagggttcggagtgttgatggtgttgtcggacggggacaacgagtgcgaaaacatcagcgatttggcagggttgaaccaacaccgcgtatggcttgcctttttgatgctgctggttatgttctctatggcgggcattccgccgctgatgggtttttacgccaaattcggcgtgattatggcactcttgaaacaaggccatgtttggttgtctgtatttgccgtcatcatgtcgctgattggtgcgttctactacctgcgcgtggtcaaagtcatctacttcgatgtgcctgatcatgaccagccggtcggcagcaactatgccgccaaatttgttctgacggtcaatgccttcttgctgctcctgtggggcatcatgccgcaaaccgttatcgactggtgcgccaaggcgttggagaacacgctgtaagccgccgcaacggcagccgtgtcagaggctgccgtttttgttaagatatgccgttccgcaacgcggttcagacggcatcgccgccgacaacgcctaaacagaaagcccaccatgaccgcatccatgtacatccttttggtcttggcactcatctttgccaacgcccccttcctcacgaccagactgttcggcgtggccgcactcaagcgcaaacatttcggacaccacatgatcgagctggcggcaggtttcgcgctgaccgccgttcttgcctacatcctcgaatcccgtgcaggatcggtacacgatcagggttgggagttttatgccacagtcgtctgcctgtacctgatttttgcgtttccatgttttgtgtggcggtatttttggcacacgcgcaacagggaatagacaagcataggaatgccgtctgaaaccctttcagacggcatttgtttcattcaagtgcaggccggcatcgctgtgccggcacgtttcagccggcgatatacgccggttttaatatttgcgggcgactgcaaattctgccaactgccgcaggcgcagggctttgtcgccgaagggttcgagcagcgcgaccgcttcggcaaccagtttgtgtgcgtatgagcgcgccgcttccaagcccatcagtttcacataagtcggcttgtcgttgtctgcgtctttgcccgccgttttgcccaaagtcgccgtgtccgcttcacaatccaacacatcgtcaatgacttggaacgccagccccagttttgccgcgtaagcgtccaatacggaaagttccgcatctgacagatcaggacacgccgtcgcccccaataaaaccgccgcacggattagcgcacccgttttcaggctgtgcatctgttccaaatcggcttgaaccatttgtttgccgacattcgccaaatcgattgcctgaccgcccgccatacccctgctgccgcccgctttcgccaacaccgacaacattgccaactggcgtgcggcgggcagttctgtcggacggctcaacacgtcaaatgcctgtgtctgcaaagcgtcgccggtcagaagggcggtcgcttcgccatatttgatgtggcaagtcggtttgccgcgccgcaggctgtcgttgtccatcgccggcatatcgtcgtgaaccaaagaatagacgtggatcatttcgattgccgccattgcctgttctactgcttcatgcacggcttcgcctaattccgaagctgccagaaccagcatcggccgcagacgcttaccgccgtccaaagccgcataacgcatcgcttcgtgcagtgtgtgcggtatttccccctcagacggtaaaaaccgttcaagcagcagctctgtttgcgcctgcgccctctgttgccacgttttcaaatcattcgtcggattcaaggtttaactccttcagcccgtctgtgtctaaaacctgtagcttttgttcgacttgtgccagtttggtttggcagtacctgaccagttcgttgccttcctgataggcggcaagcgcgtcttccaagggcatttcgccctgcatagactgcgtcagcgattcgaggcgcgacaaggcttcttcaaacgatttcggggcgtttttcttcatcgtatttccttttcggttgaaaccccgccctttagggcggcaggatcagactttatttgggaggggtgtaaccctttccaaatcagggcaatacatagggcggtgctttatgtgccgtcctgtgtgttggaacatagtttcggatgttccggtaaaaagcggattgtagcatttttgaaaaacggatgccgtctgaaacccgaatccggcttcagacggcattttttccgcccaggcggcaaggcgttacccgggcagttcgtcggtgatgccctgcaaaaaggcgaggcgttcggggcttgccgccccggtttgcgcggcggctttgaaggcgcagccgggttcggcgcggtgggtgcagttgtggaagcggcattgcccgacaaggtggcggaaatcggggaaatagcgcggcaaatcggcggcttggaggtggtgtaaaccaaattcttgcaaacccggggagtcgatgagttgggtttcgccgttcaaatcataaagccgggcgtgggtggtggtgtgttttcccgagtcgagtgcggcggaaatgtcgccggtgcgggcggtttggctgcccaaaagggcgttggtcagggtggatttgcccataccgctctgcccgagcaggatgttgctgtgcccttgcagggcggggcgcaggctgccggcgttttccagtgcgcgggtttcgatgacgggataacccagcgtttcgtagaatttgagtttttcgcgccaaagggcggtttcgggcaggtcggctttgttcaggacgatgacggcttcaataccggcggcttcggcggcaagcagggcgcgttgcagcagccgcacgctcggactcgggacggcggcggttacgatgaggagttgggtaacgttggcggcgatgagtttggttttccacgcgtcttggcggtagagcaggctttggcgcggtaaaaaatcttcaatcacaacttgttcggcgttgacggggctgatgcggacgcggtcgccgcaggcgaaatcgacgcgttttttgcgggtgctggcttcgtaggttgtgccgtcgggcgtgcggacaatgtagcggcggccgtagctggcggtaatttgggcggtgtcgttcatggtttctttggggttgggtgtgggaatgccgtctgaaaacgggtgttcggacggcatcggttcagtcgtgctgccactcgacgtgttcgttgaggaagccgccgctctggtgcgcccagagtttggcgtaaagcccgcgtttttcgaggagttcggcgtgtgtgccttcttcgatgatgcggcctttgtcgaggacgacgagcctgtccattgcggcgatggtggagaggcggtgggcgatggcgatgacggttttgccgtccatcattttgtcgaggctttcttggatggcggcttcgacttcggaatcgagcgcgctggtggcttcgtccaaaagaagaatcggtgcgtctttgagcatcacgcgggcgatggcgatgcgctggcgttgcccgccggagagtttcacgccgcgttcgccgacgtgtgcgtcgtagccgcgccgccctttggcatcggaaaggtcggggatgaagccggcggcttcggcgcgttcggcggcagaaaccatttcggcatcggtcgcgtcggggcggccgtaaataatgttgtcgcgcacggaacggtgcagcagcgaggtatcttgcgtgaccaaaccgatttgggcgcgtaaagattcttgggtaacgccgcttatgtcctgcccgtcgatcgaaaccgtgccgctttgcggttcgtagaagcgcaaaagcaggttgacgatggtggatttgcccgcgccgctgcgtccgatcaagccgactttttcgcccgggcggatggtgaggttgaagccgttgagcagcggtttgcccgcttcgtaggagaaatcgacgtgttcaaatttgattgcgccttgcggcacgttcagcggcagtgcccggggcttgtcgaggatggtgtgcggtttggacagggttgccatgccgtcgccgacggtgccgatgttttcaaacagccgcgcggattcccacataatgtattgcgacaaaccgttgacgcgcaacgccatggcggtggctgtagcaaccgcgcccacgccgacctgcccgttgtgccagagccagatgcccagtgcggcggtggagagggtcagggaggtgttgacgatgaagctgcacgaatgcagcagcgtcgccagccgcatttgggcgcgcaccgtaaccataaattcttccatcgactgcttggcataggcggcttcacgcgcgccgtgggagaagagtttgacggtggcgatattggaataggcatcggtaatgcggccggtcatcagcgagcgggcatccgcctgccatgcggcggtttgccccaatttgggaatcagcaggcgcatcaccgaagcgaaaccgacaatccagccgataaagggcagcagcagccatgagtcgagcgaggcgagaatcacgccggaggtaatgaaatacaccgacacataaacgaccatatcggcaaccgtcatcaccgcgtcgcgcaacgccagcgcggtctgcatgactttggcggacacgcgtccggcaaattcgtcctgataaaaaccgaggctttggttcagcatcaggcggtggaagttccagcgcaggcgcatggggaacacgccctgaagggtttgcaggcgcacgttggacgcggcaaacgcccacgcaaccgaaaataccatcatcgccgccattgccgccagttcccaacttttttcggcaaacagttcggcgggcgcgtatttgccgagccactccacgattttgcccataaattgaaaaaccagggcttccataatgccgatgccggcggtcagcgcagccagggcggctatccatttccgcacgccggccatgctgctccagacaaaccgccacaagcctttttctggcgttttcggggcggcttcgggataagggtcgattcgggactcgaaccaggaaaatattttgttcaacattgttttcgatttcggtaaaacagtttcagacggcatcaaacacaatgccgtctgaaaggaaggacaataacgccattttacgggaaaagccgtcgggaagacagcgcgaggcggaaacgcagggtttcgtcagggcaaacgccgcgccgccttcaggcggcattatttcagcaggtttttcaaagcaaggcgcacgccttcgcccacgtccgtcccctccggaacgcctttgaccgccgcttttgcttcgcgttcgctgtaacccagcgcaagcagcgtgctgacgatgtcttccgtttcgtcggcggcgggtgcggcggcaaacagcccgtccgttaccgtatgcgcgaccagcttgccgcgcagttccaaaaccatacgttcggcggtttttttgccgattcccggggcggaggagaggcgtttgacatcttcttctgcaaccgcccgcgccagttcgtcggcagtcattgccgacaaaatgcccaaagccgttttcgcgccgatgccgccgaccttgatcagttggcggaaggtcttgcgttcttccgcagtggcaaaaccaaataaaagatgtgcgtcttcccgaatgataagctgggtaaacagttgtacgctttcacccacgggcggcaggttgtagaaggtctgcatcgatacgtcggcctcatagccgacaccgttgacatcgatgacgatttgcggagggtttttttcaaccagtttgccggtcagtctgctgatcatgtgtgccgaatcctgaagtgtcgggtgcaaaatgccgtctgaaaccggtttgggcttcagacggcacggattgtatcaaattcagtcgtcgcggcgggaggaaatcacgcggccggtacgggcatcgacaacgactttgtattcctgtccgtttttgacgatttcgacatcatagtgcggacggccgttgtcgtgttcgagatcgatgtcggtgattttgccgccgacacgcgccaacgctgctttttcggcttgggcgcggctgatgattttgtcttgtttgttgtgttggtgtgcggcgtgtccgtggtcgtcatcgccgtgtccgtcgtggtgggcgagcgcgggggcggaaatgctcagcagtgcggttgcggcggaggtcaagagaaggtgtttgatgttcatattttgcctttgtaaatcgtgggttggaaaatgtggatattaataaggtatcaaataaccgtcagccggcggtcaataccgcccgaaccataccgcgcgcctgagcttcggcttcggcggcgcgttcctgcgaggtaaacggtcccattttgacgacgtattcgtaacggcgtttttcaaccgagaggttcgtacccgatgacgaaacggcgaagttttgggcggcttggttcagataggcttgtgcttcgtgttccgtaccgaaagatttcaagtcgataaagatgtctttgttttcggcaaccggtgcggattggcccgggacgatttgttcgattttgacgtgtgccgtcccttggttgacaaagcccaatttttgcgcggcggctttggatacgtcgatgatgcggttgccgtggaaggggccgcggtcgttgacgcggacgatgacgcttttgccgtttttggtattggttacgcgcacatagctggggatgggcagggttttgtgggcggcggtaaaggcgttcatatcgtatcgttctccgccggaagttttgcgcccgtgaaacctgccgccgtaccacgaggcgttgccggtttgcgtgaattcggcgacttggtttttcggcgtgtagcgttttccggcgactttgtagctgcggttggcggaggcgtgcagtttttctgccttgaccactgcgtcggcggatgccgtctgaagggagtgtgtgccgaatgcggcggtgagaaggaaaagggtttttcgggttaaagtcaaaacgtgttccgttcttgagttgaagacgaatgggcatcatgcccgccggatacgttccgaaccgccgtacagtgcggacggcggttcggaatgtgtccggataggttttcagacggcatgaacctgcgttcaaacgccgcctgcgtaaccgtgttgccgccacgcttcaaagagaatcacggcgacggtgttggaaaggttcatactccggctgccgggctgcatcggcaggcggattttttgcgcggcgggcaggctgtcgaggatgtcggcaggcagtccgcgcgtttccggcccgaacagtaaaacgtcgcctttttgaaacgcggtttcatcggggcgcgccgtgcctttggtggtcagggcgaaaatgcgcctgcctgcgagtgccttgaggcagtcgtcgaagttttcgtgcaccgtcaggctggcgaactcgtggtagtcgagcccggcgcgtttcattttggcggaatccaatgggaagccgagcggtttgacaaggtgcaaatccgcgccggtattggcgcacaggcggatgatgttgcccgtgttcggcgggatttccggctggtataaaacgatggtaaacataaatatcaatcacttataggcgcgtaaccttgccacaaggcggatggggtgtcaaaaaatttagttattttttcattggcgtgcgtgccagcgtccagcagcagattcggtttgcgcccgattttttcagcgtctttgccaattcgtccagcgtcgcgccggtggtaaagacatcgtcgattaacagaatattacagttttccggtatcggtgtgcggatttcaaaggcgtttttgatgtttcgccgccgttcgccgcctttgagcgtgctttgcggcgggcggtggtgtcggaaaacggtgtgtcggggcagtatctgccagccgtagcgttgtgccagcagcccgacgatgctttcactttggttgaacccgcgttgcagcagccgctccctgcttagcggtacgggcaggacgaaatcgaaacattcgtctgcaagccggtcgggcggattctgcatcatcaggtctgccagcggctgcaccatgctcaaatcagccaagtgcttcagcgcgtgtatcatattgctgacgggcggttcgtaatgcagcgaagcccacatccggtcgaatgcgggcggttttttctgacagccgccgcacaccgatccgccttggatgtgtctgaaacacagggggcagctgtttgccgcgtcggtgcggtatgccgccaaatcgtcgcggcagccggcgcagatgccgtctgaaacgccagacgaaccgtggcataatacgcaacgcctgatagtgggcgcgtctgcgatgcgccgccaacgagagagaaaatccatgcctgatgccgtcaaaaaagtttacctgatacacggttggggggcgaaccgccacatgttcgacgatttgatgccgcgcctgcctgcaacgtggccggtgtccgccgtcgatttgcccggacacggggacgctccgtttgtccgacctttcgacattgcggctgcggccgacggcattgccgctcaaattgacgctccggccgacattctcggctggtcgctcggcggattggtcgcgctgtatctggcggcgcgccatcccgacaaagtccgttcgctctgcctgacggcgagtttcgcacggctgacggctgacgaagactatcccgaagggcttgccgcgcctgcattgggcaaaatggtcggtgcgttccgttcggattatgccaaacatatcaaacagtttctacaattacagcttctgcacacgcctgatgcggacggaatcataggcagaatcctgcccgatttggcgcgctgcggcacgcctcaagccttgcaggaggcgttggacgcggcggaaagggcggatgcgcggcatttgttggacaagatagatgttccggtactgctggtgttcggcggcaaagacgcgattacgccgccgcgtatgggtgaatatctgcaccgccgtttgaagggcagcaggttggttgtgatggaaaaggcggcgcatgcgccgtttttgagccatgcggaagcgtttgccgcgctgtaccgcgactttgttgaagggggtttgagatgaaccatcaggacgcacgctggcaggttcaccgccatcttgccgaacataccgaccaacggctgacactcgtccgcaacgcgcccaagcatatcctgcttgccggtgcggatgcggacatcagccgcagcctgctggcgaaacgctatccgcaggcggtatttgaagaatacgattcccgtgcggattttttggcggctgccgctgccgcccgcaaaggcggtttttggcaaaggtttacgggtaagggcgtggtgcaacactgccaatccccgatcgcgccgctgcccgaagcgtgtgccgatatgttgtggtcgaatctcggactgttggcggcggaacaaatccttcctgtgctgcacaactgggcgcgcgccttgaagacggacgggctgctgttttttacctgcttcgggcgagataccttggcggaactgaaatgccgtctgaaagaaaacggcattgaaagccgcagcgcgcttttccctgatatgcacgacttgggcgatatgcttgctgaaaacggcttttacgaccccgttaccgatacggcgaagctggtgttggattacaaaaaggcggaaacgttttgggcggatatggacacgctgggcgtttggcgggcgatggcgtggaacgatgaaaacgccgcgcgttcgtgtgtcgggacaatatttgagcgggaaggcggtttgggcattacgctggaaacggtgtacggacacgccgtgaaaaaactgatgctgccgcaaggggagaacgtggtgcagttttttccgaagagatgatgtgcagatgccgtctgaagccgtttccaggtttcagacggcatttgtctgtgaaaaccgacagaaataaaggaaatgccgatgtatagtgaattaaatttaaaccagtacagcgttgcctcgccttagctcaaagagaacgattctctaaggtgctgaagcaccaagtgaatcggttccgtactatttgtactgtctgcggcttcgccgccttgtcctgatttttgttaatccactatatgctgatgccggagacgtatattgcgtctataacatcagactgaagcagtacactgcctgccaggttacccgagttgaagaacacggtggcaaaaaaaacacatgcgaccctgctggctttggactggcagggcaacaaaccgcttggggcggaggagctggcggatttgaaatcgctttacaaagacttaaagaataatattggaaatattgtatgaacaaaaaattaaactatatttttatgttggactgtttagggttggtgatattgtttacttgtataatagctacttttgaaagagattatggatttaaaatttttactaattctaagagacctgaattttattattggattggaatgttttattatggaattatttcttgctggtttgattatcaattaatttcaacaaaggcgaattcgtataaaagaaaagttaaacaatataaaattttttcagtaatattttcagttttgatatttatttctactatagtaaaactttaaattttggagcaaaaatttatgagcgattcaattgaatatgtattgggaacgcggtctgcacatgtataaggcaagtgccgtcgtgccgacgggatatgtacgggttgggaataccgcgccgctggtcggcgaagacacgcaacggtatgcctctttttggggcgacggctacgacgtgtaccgtcagttgagatggcagcagatacccgaaaaacagagaaaggcattcaaaaaagccgccaaaagcaaaaagaccgtgatgtttgccggacgggaatacggcatatccaaacagaatttgagcgatgtttgggatgattttgaagacgcgatggaactgaaggcgtttccctgcctgtcttcgctgtttctgaccaaatggcataaaaatctatatgatagtggattaacaaaaaccagtacggcgttgcctcgccttagctcaaagagaacgattctctaaggtgctgaagcaccaagtgaatcggttccgtactatttgtactgtctgcggctcgccgccttgtcctgatttttgttaatccactataaaaacaggaatttttaaatagaggcaatgccgtctgaaacttggtaacgggcttcagacggcatttcgttccaataccgccaacaccgccgcaccgtaacgtgcggctttttcttcgcctacgccgtatacggcggcaagctccgccaagccttccggctgtttggcggcaatggcgcgcagtgcggctttgctgagaatgcggtagggttcggactgttcgtgttttgccgtttcgccgcaccattggatcagggcgcgcatcaggcggcgtttgcgtttggcggtttcatcgatgccgtctgaaaacggacggcagacggcgaggatgtcccgtccgtatttggcggcgcgtacgctgcccaagccgtacacgccttcgaggtcggtttcggtttcgggcgtatcggcaagcatatcggcaaggctttcgtcggagaggacggcatgcagggcgcagttttccgcccttgcctgttcataccgccaggcttcgagtttttgacgcagttgttgttcgcgttcggtttgcggacggatgaccgcgtcgcggctgaagccggcggcgttgcggcagacttcgaggatgccgtgtccgaaacggtcgattttggcttcgcccaaaccgtagatgtcgtgcagaccgttgaggtcttgcggcattttttcgacaaggtcgcgcagggttttgtcgccgaaaatcatataggcggggatgccttcggcttctgcctgtttcatacgccaaacgcgcaatgcctgccacaggcgttcttcgcgttcggtacgcagccagttgtctttgagggtgcgggcggcgggcttgtcgcgcttgagcggacgcagcatcacttcggtttcgcctttgaggacttttttggcggcttcggtcagttgcaatgcctgatatcgggtaatgttgacggtgaggtagccgaggctgatacactggcggatgacgctgcgccattctttgtcggacaactccgtaccgatgccgaatgtggacagttgttcgtgccggttgccgcgtatccaatcgtcgcttttacctcgtaaaatgttggtgatgtaaccggcggcaaaacgttgtccggcgcggtacacgcagctgagtaatttttgcaccaacaccgtgccgtcaaaccgtacgggcggatgcaggcagttgtcgcaatggccgcagggttcggatgcttcgccgaaatgtttgagcagcagtacgcggcggcaggcggcggtttcgcagacggcaagcatggcatcgagtttttgcatttcgatttgcttttgcacctcgtcgctgttgccttcggcaatccgttcgcgcagcaacacccaatcgttcaaaccgtaacacagccagcttgcggccggcagcccgtcccgtccggcgcgccccgattcttgatagaaatgttcgacactctggggcatatcgagatgggcgacaaagcgcacgtcgggtttgtctatgcccatgccgaacgccacggtcgccaccacgataatattgtcttcatgcgtaaagcggcgttggttttcctcgcgtacgtccatgctcaaaccagcatgatacggaatcgcgtttaatccgttttcacgcaaaaactgcgccacatcttccacctttttgcggcttaggcaatacacaatgccgctttgccccgtcatttctttgcggatgaaatccagcaattgttttttgccgttgtttttttcgataacctgataataaatattcggacggtcaaagctggagacaaattcgggcgcatcgtccaagtgcagataatgcttgatgtcggcgcgcgtggcggcatcggcggtagcggtcagagcgatgcgcgggacgttcggatagcgttcggcaagcatgccgagctgttgatattcagggcggaaatcgtgtccccattggctgacgcaatgcgcctcatcaatggcaaacagactgacggtttgttggtcgagaaaacgcaaaaagcggtcggtaaccaagcgttccggcgcgacataaagcagcttcagacggccttgggcaagccggtcggcaatctcgcgcgcctcgtctgccgatgtgccgctgttgactgccgccgcttcgatgccggcggcgtgcaggtttgccacttggtcgttcatcagcgcaatcagcggcgatacgacaaccgccacgccttcgcgcatcagcgcgggaatctggtaacacaaagacttgccaccgcccgtcggcatcagcaccgtcaaactcccgccgcctgccaaagtattgatgacagcctcctgcctgccgcgaaattcgggataaccaaatacttcgtgcagaatctgtttggcggtcggtcggtgcatgatggttccgtgctcggtaagggtgttgatcggtcggcggcaatatgccgtctgaaatcgggatttagaatagtttgcccacttctgcttcaatatcgtcggcacgcataaacgtttcgccgatcaggaaggtatgcacgccgcgcgattgcataaattccacatccgccttgcctgtaatgccgctttcggtaacgacggttttgccttccagcgcgggcagcagcgacagggtttggtcgagggagacttcaaaagtcctcaggttgcggttgtttacgccccacagcggcgtggtcaggttgcggcatttttccaattcggtttcgtcgtgcagctcgagtaggacggtcatgcccaattcgtgcgccaccgcttcaaagcgttccaattgttcctgttccagtgctgcggcaatcagcaggacggcatccgccccccatgcgcgcgcctgataaacctggtattcgtcgatgatgaagtctttgcgcagcacgggcagcgatacggcttcgcgcgcctgtttgaggtattcgggcgaaccttggaaatagggttcgtcggtcagtacggacaaacacgccgctccggcgttttcataggcgcgtgcaatctcggcagggcggaagtccggacggattaaccctttgctcgggcttgcctttttgatttcggctatgacggcgggcaggtttaggcggtgtttgccgcgtatcgaatcgatgaagctgcggacgggcgcggcttctgcggcaagtgtgcggatgtgttcggcgttgacggcggctttttgagcggcaacttcctgtgctttggtggcaaggattttattgaggatgtcggtcatgtcgggttccgtattcgtctggggaaagggggaatattagcatcaaaccgttaacgcctgtttgtgcggaagctgtcgaaataggacaggacggtctgcggcagccattgcaggtgcagcctgccgccggtgctgctgacaaagccgacatgaccaccatatgccggctggaacagggtaacggcttcggatacttcgtctgcgcggggcagggcttcgggcggcaggaaggggtcgttgacggcattgagcaggagcagcggtttggcaacgtgtttgagcagcggtttgcaggaagtttggcggtagtagtcgtgccggtcggcaaagccgtgcagcggtgcggtgaagcggtcgtcaaactcgcccagtgttttgcaccctgcggcaaatgccgtctgaaaaccttggagcgattttgctttgggtatcagggtgcggaggaagtagcgcgtgtagagcagccgcgtgatgccgctgtcgaagcgtctgcctgccgcctctgcatcgacgggggcggagatgacggcagcggcttgcggcaatgcctttttgccctgttcgcccaaatattttgccagcgcgttgccgcccagcgatacgccgacggcgtatatttcacggtaacgcgcggcgaacgtgtccaaagtaaaggcgatttcggcggtatcgcccaagtggtagaacaccggagcggtgttggcaatgccgccgcagctgcggaaatggacgactacgccgtgccaaccccgatcgcgtaccgcaagcatcagttcgaccgcgtaatggctgcggctgcttccttccaaaccgtgaaacagcacgaccagcggcgcatcgggcgaaatgccgtctgaaaagtcgtaggcgactttggttttacccgtgctgtcgggaagcagctctcggcggtatgcgggcgcggggcgttgcaggaatttggcggcaatcgtgtcggcattgccgttgcggaggaaaaagggcgtgtccggcggtgttaaaatcataaggtatcggttttcttgttttcagacggcattgatgatgcggcagcccgtccggctggtgcggacgtgggggatgcgcgcccgaatataggcgtggaaaagcgtttgccgaaaaaggatatcggcatcggtcagttttccacgcgtttgaaatggcgcggacggaagcccaaagccgccagtgatgcgaaatacagtccgccgccgacggcaatcaggatgcagagctgccccgctttccgcattccgccggcgtgcgcccattcaaacggcaggtaagcctgcgctgcccacagtccgccgcacatcacggcgagcgagagcagcatttttgctaagaacgctgcccaacccttgccaggttggtaaataccgtgtctgcgcaacaggtaaaacaacaatccggcattgatacacgcgcccagaccgatggcaagcgaaagtccgacgtgtttcagtgggccgataaaggcaaggttcatcaactgcgtgcagatgagcgtgaagatggcgattttgacgggcgttttgatgttttgccgcgcatagaagccgggtgccaacactttaatcatgattaagccgattaaaccgaaagaataggcaatcagcgcgtgttgcgtcatctgcgcgtcaaacagcgtaaattcgcggtacataaacagcgtcgccaccagcgggaacgacaacaccgccagtccgaccgccgccggcagcgtcagcagcatgcacaggcgcaaaccccagtcgagcagggcggaaaactgttccgtatcttggtttgccgagtgtttggacaaagtcggcagcaaaatcgtaccgagtgccgcccccagcacgccgctgggcagctccatcatgcggtcggcgtaatacatccatgaaacgctgcccgattgcagataagacgcgaaaatcgtgttgatcaccaaagaaacctgcgccacgctcacgcccaaaatcgcaggcgccatctgtttcatcacgcggttgaccgccgcatctttgaaactcagtttgggcagtttcaaaaagcccagtttcgccagccagggcagttggaagccgagttgcaaaatgccgccgacaaagaccgcccacgccagcgcggtaacgggcggatcgaaatacggcacgaaaaacagcgcgaatacgataaacgacacgttcagaaacgtgggcgtaaacgccggaatgccgaacttatgataagaattgagtaccgagccgacaaatgaagacagggaaatcaataatatataaggaaacgtaatccgcagcaaatcgatggagagctgaaatttgtcggcatcttgggcaaaaccgggtgcggaaacataaatcacccaaggcgcggcaagtatgcccagcgcggtaacgataaccagtacaaacgacagcatccccgccacatggcggataaaagcctccgccgcctcttttgaacgcgtttccttgtattccgccaaaatcggcacaaacgcttgggcaaacgccccctccgcaaacacgcggcgaagcaggttgggcagtttgaacgcgacaaaaaacgcatccgtcgccatacccgcgccgaatgcccgcgcaatgaccgtatcgcgcacaaatcccaaaacgcgcgacaccatcgtcaggctgccgacttttgccaaagctcccagcatattcatcattgttcctcaacagtcgtacccgtctggggcaacggcgcgtattgtacgacagaaaccgcttcagacggcatcgggtttgatgccgtctgaagcggtttcctgaaacgaaaacgtccttttccggcggcaaactgtatcaatacgcggaaatgcaataaaatagccggattccgattgatttccaacatctgtttccaacatcacggagaaccgtatgaaatccagacaccttgccctcggcgttgccgccctgttcgcccttgccgcgtgcgacagcaaagtccaaaccagcgtccccgccgacagcgcgcctgccgcttcggcagccgccgccccggcagggctggtcgaagggcaaaactataccgtccttgccaacccgattccccaacagcaggcaggcaaagtcgaagtccttgagtttttcggctatttctgtccgcactgcgcccacctcgaacctgttttaagcaaacacgccaagtcttttaaagacgatatgtacctgcgtaccgaacacgtcgtctggcagaaagaaatgctgacgctggcacgcctcgccgccgccgtcgatatggctgccgccgacagcaaagatgtggcgaacagccatattttcgatgcgatggtcaaccaaaaaatcaagctgcaaaatccggaagtcctcaaaaaatggctgggcgaacaaaccgcctttgacggcaaaaaagtccttgccgcctacgagtcccccgaaagccaggcgcgcgccgacaaaatgcaggagctgaccgaaaccttccaaatcgacggtacgcccacggttatcgtcggcggtaaatataaagttgaatttgccgactgggagtccggtatgaacaccatcgaccttttggcggacaaagtacgcgaagaacaaaaagccgcgcagtaagcccgtttgaaaaatgccgtctgaaacttggttttcagacggcattttgattgggtttaaaacgtaaagcccgtttccagttcttcatcgccgaccagttcgaccaagagcgcgtagagcggggcgagttcggcataacggcgcgatacgcggcgcagatagtttaagaaacgcgggatttccggacggtatttgtctttgccgtcgcggtagtacaggcgtgcgaagatgcctgcaaccttcaagtgccgctgcacgcccatccattcgaaccagcggtaaaactcgtcaaacgcttcggggacgggcaagccggcagcccgcgccttttcccagtagcggataaccaagtccaagacaaattcttcttcccattcgataaaggcatcgcgcaacagcgacaccaaatcgtaggaaatcgggccgtaaagcgcgtcttggaagtctaaaacgcccggcctgccgcgcgtcagcatcaggttgcggacgataaagtcgcggtgcacatagactttgggctgcgccaacaggggcggcagcagcgtatcgacggtttgctgccaaagttggcgttgtttgaatgttaattcgcgccccaattcttttgcgacaaaccattccgggaacaggttgatttcgcgcaacatcgtttcacggtcatattcgggcaaaaccccttcacggctcgccttctgcaattcgaccaactcgccgattgcctccaaaagcagggctttgtgcgccgtttcgccctgttcctgaagcattgcggtcaaaaacgtcgtattgcccaagtcgttcaataccacaaaccccagatccgtgtccgcgtgcaatacctgcggcacattgaccatgtcaaacagtttctgcactttcaaataaggtgcgacactcatcttgtcgggcggtgcatccatgcagacgacactgctgccgtctgaaaacgttgcacggaaatagcggcggaaatcagcatccgccgccgcaaaagtcagatcgaagtcccgttcgggataaacggtctgaagccaatttttcagtttgatttgtcgttgcataacagtactaaagcatttcaggttacaataaacgctattctaactggcaaaccgacttgaggggcgattttggctcgtttattttcactcaaaccactggtgctggcattgggcctctgcttcggcacgcattgcgccgccgccgatgccgttgcggcggaggaaacggacaatccgaccgccggagaaagcgttcggagcgtgtccgaacccatacagcctaccagcctgagcctcggttcgacctgcctgttttgcagtaacgaaagcggcagccccgagagaaccgaagccgccgtccaaggcagcggcgaagcatccatccccgaagactatacgcgcattgttgccgacaggatggaaggacagtcgcaggtgcaggtgcgtgccgaaggcaacgtcgtcgtcgaacgcaaccggacgaccctcaataccgattgggcggattacgaccagtcgggcgacaccgttaccgcaggcgaccggttcgccctccaacaggacggtacgctgattcggggcgaaaccctgacctacaatctcgagcagcagaccggggaagcgcacaacgtccgcatggaaatcgaacaaggcggacggcggctgcaaagcgtcagccgcaccgccgaaatgttgggcgaagggcattacaaactgacggaaacccaattcaacacctgttccgccggcgatgccggctggtatgtcaaggcagcctctgtcgaagccgatcgggaaaaaggcataggcgttgccaaacacgccgccttcgtgttcggcggcgttcccattttctacaccccttgggcggacttcccgcttgacggcaaccgcaaaagcggcctgcttgttccctcactgtccgccggttcggacggcgtttccctttccgttccctattatttcaaccttgcccccaatctcgatgccacgttcgcgcccagcgtgatcggcgaacgcggcgcggtctttgacgggcaggtacgctacctgcggccggattatgccggccagtccgacctgacctggctgccgcacgacaagaaaagcggcaggaataaccgctatcaggcgaaatggcagcatcggcacgacatttccgacacgcttcaggcgggtgtcgatttcaaccaagtctccgacagcggctactaccgcgacttttacggcaacaaagaaatcgccggcaacgtcaacctcaaccgccgtgtatggctggattatggcggcagggcggcgggcggcagcctgaatgccggcctttcggttctgaaataccagacgctggcaaaccaaagcggctacaaagacaaaccgtatgccctcatgccgcgcctttcggtcgagtggcgtaaaaacaccggcagggcgcaaatcggcgtgtccgcacaatttacccgattcagccacgacagccgccaagacggcagccgcctggtcgtctatcccgacatcaaatgggatttcagcaacagctggggctatgtccgtcccaaactcggactgcacgccacctattacagcctcaaccgcttcggcagccaagaagcccgacgcgtcagccgcactctgcccattgtcaacatcgacagcggcgcaacttttgagcggaatacgcggatgttcggcggagaagtcctgcaaaccctcgagccgcgcctgttctacaactatattcctgccaaatcccaaaacgacctgcccaatttcgattcgtcggaaagcagcttcggctacgggcagctctttcgcgaaaacctctattacggcaacgacaggattaacaccgcaaacagcctttccgccgccgtgcaaagccgtattttggacggcgcgacgggggaagagcgtttccgcgccggcatcggtcagaaattctatttcaaggatgatgcggtgatgcttgacggcagcgtcggcaaaaaaccgcgcaaccgttccgactgggtggcatttgcctccggcagcatcggcagccgcttcatcctcgacagcagcatccactacaaccaaaacgacaaacgcgccgagaactacgccgtcggtgcaagctaccgtcccgcacagggcaaagtgctgaacgcccgctacaaatacgggcgcaacgaaaaaatctacctgaagtccgacggttcctatttttacgacaaactcagccagctcgacctgtccgcacaatggccgctgacgcgcaacctgtcggccgtcgtccgttacaactacggttttgaagccaaaaaaccgatagaggtgctggcgggtgcggaatacaaaagcagttgcggctgctggggcgcgggcgtgtacgcccaacgctacgttaccggcgaaaacacctacaaaaacgctgtctttttctcacttcagttgaaagacctcagcagtgtcggcagaaaccccgcagacaggatggatgtcgccgttcccggctatatcaccgcccactctctttccgccggacgcaacaaacgaccctgaccgtcggaaacctggcaggagcaccgttcccgcacaagacggcattccaccgacaaccccaaacccgccatcaaaggcaggattcaaacgataaggaaagaatgatgaaaatcaaagccctgatgattgccgccgcattgctggcagcagccgatgtccacgccgcaccgcaaaaggcaaaaaccgcatccgccaaagctgccaaagctgccaaagctgccaaagttgccaaagttgccaaagttgccaaagttgccgccacggcgcaaaaagaagccgcacccgcacaacagcagggcggtatccgcttttcagacggcattgccgccgttgccgacaacgaagtcatcacgcgccgccggcttgccgaagccgttgccgaagccaaagccaacctgcccaaagacgcgcagataagcgaatccgagctgtcccgacaggtgctgatgcagcttgtcaaccaatccctgattgtacaggcgggcaaacgccgcaacattcaagcaagcgaagcggaaatcgatgccgtcgtcgcaaaaaatcccgccctcaaaaacctcagccccgcccaacgccgcgattttgccgacaacatcattgccgaaaaagtccgccagcaggcagtgatgcagaacagccgcgtgagcgaagctgaaatcgatgccttcctcgagcaggcgcaaaaacaaggcatcaccctgcccgaaggcgcaccgttgcgccaataccgcgcccaacacatcctgattaaagccgacagcgaaaacgccgccgtcggcgcggaaagcaccatccgcaaaatctacggagaggcccgcagcggcacagacttttccagcctggcgcgccaatattcgcaagacgcgagcgcgggcaacggcggagatttgggctggtttgccgacggcgtgatggttcccgcctttgaagaagccgtccacgcgctcaaacccggacaggtcggcgcgcccgtccgcacccaattcggctggcatatcatcaaattgaacgaagtgcgcgatgccggcacacctcaggaacgtatccgcaattccgtgcggcaatacatcttccaacaaaaagccgaacaggcaaccgtcaacctgttgcgtgacctgcattccggcgcgtatgtcgacatccgctaaggcggtttgaagcaaaaagccataccgatcggcaaaaatccgggcggtatggctttttggatttcgagttacttttacaccgtcattcatcattcccgcgaaagcgggaatctagaaacgaaaagtaacaggaatttatcgggaatggctggagtttaaaggactggattcccgccgtcgcgggaatgacgggattttgggttgtggtaatttatcggaaaaacaaaaaaacctatgccgtcattcccgagcaggcgggaatccggttatttaaaactgcagaaatttatccgaagcaacaacaatctttccatcgtcattcccgcgtaggcgggaatctaggacgtagaatctaaagaaaccgttttatccgataagtttctgtaccgaagaatctggattcccgctttcgcgggaatgacggcgcataagttcccgtgcggacagacctagattcccacctgcgtgggaatgacgattcagaagttgcctgaaacctaaaaaactgaaaccgaacgagccggatttccgctttcgcgggaatgacgggattttgggttgtggtaatttatcgggaaaacggaaacccctatgccgtcattcccgcgcaggcgggaatctaggacgtagaatctaaagaaaccgttttatccgataagtttctgtaccgaagaatctggattcccgctttcgcgggaatgacggcgtataagttcccgtgcggacagacctatattcccacctgcgcgggaatgacgattcagaagttgcccgaaaccaaaaaactgaagccgaacggtctggattcccgctttcgcgggaatgacggcgcataagttcccgtgcggacagacctagattcccacctgcgtgggaatgacgattcagaagttgcccgaaaccaaaaaactgaagccgaacggtctggattcccgctttcgcgggaatgacggcgcataagttcccgtgcggacaggcctagattcccacctgtgtgggaatgacgattcagaagttgcctgaaacctaaaaaactgaaaccgaacgagccggattcccgcttttacgggaatgacgggattttgggttgtggtaatttatcgggaaaacggaaacccctatgccgtcattcccgcgcaggcgggaatctaggacgtagaatctaaagaaaccgttttatccgataagtttctgtaccgaagaatctggatttccgctttcgcgggaatgacggcgcataagttcccgtgcggacagacctagattcccacctgcgtgggaatgacgattcagaagttgcctgaaacctaaaaaactgaaaccgaacgagccggatttccgctttcgcgggaatgacgggattttagattgcgggtatttatcgggaacggcggcttggaagttcattgaaacggaaaaacaacggaaacccaaaaaaccggattcccgactgtgggaatgatgagattcaggtttctgtttttgccggagtttgccgtatcgggcttcagacggcattgcctgccgttgtacccgcgggtgcgactgccttgatgtagttgagcgagacaaactgcttctcggcatccaattcggtgattttgaacaatgcctgtgatttgggcagtgcgtcaaacggaataccggtcgcgcgcgtgaccagcggcaggccttcgatgcggacgaggtcttctttgaggatggtcgcggtcagctcgcttgtaccttgctgttgcaggtacacaaggctccagtaggcttccatctgccgttggaaatcggcgtaggcggtataggcggcatcaaagtcgcgcagtgcggcgaaaagctcggcatcgctgttttgatacagcggctcggcagtgtcgtctatcaggctgatcagctgcttttggttgatgtagtcggcggcgcggcgcagcggcgaggtaaaccagccgtaatgctgcacgcccatgccgatatgcggctcggatttggtgctcatgcgtacttttccggtgggttggacgcggaagaggccgggcaggtcgttgtcatggagcatttgtgcccaagtgctgttggcaagaatcatcatctcgctgaccagcgtatcgatgggtgagccgcgttcgcggcggacgacggataccttgccttcctcatccaattcgatgctgtaatcgtattgcggcgcgcggtcgggttcgtatttgccgcgcgctttttgcagggcggtggcgaattgatagaaccaaatcaggtcttgatggtgggcgaacatcatttcgccggcttcgtccaagccggtttcggcgttgaaatgcggctcgatggcttggatacgcaggtttgtggcgatgttgaccgcttcgattttgcaggtcggcgcgccgacgttgaactcgccgtccacatcgaaataaatgctgacggcagggcggtgtgcgcctgcatcaaggctgaacgcggcaatccagttttcgggcagcatcgtgattttgccgccggggaaataaaccgtgctcaagcgttccatgatgtttttttccattttgtcgcccggtttaacggcaagtgacggcgcggcgatgtggatgccgacacgcttcgtgccgttgtccaagtcggtcaggcttaaagcgtcgtccacttcggtggttgattcgtcgtcaatggaaaaggcggtaacgtcggccttgggcaggtcgggcatttcgggaagggcaaggtcggggaagcctgttcctttagggaagtatttgatttcaaacccgtcttgcaggtattggggaatggacgtaatgccgcccgtttttttcgccaattcgtaggcagaggttttcagcgcgtcggcggctttggtaaaggctttgtaggtcagcgactgcttgtcgggcgcgtgcaggatggttttcaaatccgccgcgatttcagacggcatctcgccgcgtttcaaggcttctgcccaagcgtcgatttgcgcgtcttgctgttttttgcgttcgatggcggcaagtgcttgttttaaagtttcttcgggcgcggctttgaacacgcctttggcttttttgtagaaatacatcggcgcggcgtaaagcgcaatcaaagttgccgccagctcggttttggtcggcgcatggccgtaatattcttcggcgatggcttcggcggtaaattcctcttcgccgcatacttcccacaataaatcggtgtcgatgtccgccgcctgtgcctgcgcgttttccaaaaacgccgccatatcgccgtcaaactcggcaaagacgttgttcgccttcactttggtgcgtttgccgtgtggggtatcgacttggtaggtggcatcgtttttttggatgatggcggcgattttgaattggccggactcttcgtaaaaaatattcatttttcggatttttctgtggaaactcaagcgggcgattttagcagattaccgaaaatgccgtctgaaaaaaggttgggagagggttggcgcggctttgcggtgcttgcgttatagtggattaacaaaaaccagtacggcgttacctcgccttagctcaaagagaacgattctctaaggtgctgaagcaccaagtgaatcggttccgtactatttgtactgtctgcggcttcgtcgccttgtcctgatttttgttaatccactatacgtttttgacggtgtacaatcgctgtttttgaacggaggatggaatggagaatacaaaccgtgtgccggagcaggcacgttatgatgccgaacgcaggcaggcagacgaagcattggcgggcgtgtttccggcagtcagtatcttcggcagcgcgcgcacgccgcagaatcatgcggattatgcgttcgcctgccgtctggcgcggcggctgtcggattcgggcattgccgtcatttcgggcggcgggccggggattatggaggcggcaaacaagggcgcgtttgcagggaagtcggtttcggtggggctgaacatcgttttgccgcacgagcagaaaccgaatccgtatcaggacatcgccttgcggttttcccgttttgccgaacgcaaggcggtgtttttccgctattcccaagcatatgtcgtgatgccgggcggcttcgggacgctggacgaattgtttgaaatcctgaccttggtgcagacgggcaaagtgccgccgcgtccgattgttttggtcggaaaggcgttttggtcgggcttggcggagtggataaacgcgcagcttttggcgcgcggtctgatttccgaaggggcggtctctttgtttgccatatcggacgatgaagacgaaatcgttgcgtatctgtcggaacacgggcttcagacggcatagcgtcctgagagtgatgtataattgcaaacaatttaacaatttttgatgtctttcccgaacaggatgccgaaatgatcaaccccatcgcctcgctttcccctttagatggccgttatgcccaatccgttgaagcattgcgcccgattttttccgaatacggcctgatgaaggcgcgcgtcaaagtcgaattaaactggctcaaagccctcgccgccgagccgaagattgccgaagtgccgcccttcagtgccgaaacgcttgccgaaatcgacacggtgattgaaaacttttcattggaagacgcggccgccgtcaaagccatcgaagccaccaccaatcacgatgtcaaagccatcgaatattggctgaaaaaacgttttgccgaagtgccggaagtcgccgccgtgagtgagttcatccacttcgcctgcaccagcgaagacatcaacaacctgtcccacgctttaatgctgcaagaagcgcgtgaggctgttttgctgccgaagctggccgaaatcatcgaaaaactgaccgctatggcgcacgaccttgccgccgtcccgatgatgagccgcacccacggccagcccgccacgccgaccactttgggcaaagaaaccgccaatgtcgtgtaccgcctgcaacgccagtttaaaaacctgcaagcgcaagagttcctcggcaaaatcaacggcgcggtcggcaactacaacgcccatatggtcgcctatcctgatgtagattgggaaacccactgccgcaacttcgtcgaaatcagcctcggtctgaccttcaacccctacaccatccaaatcgaaccgcacgactatatggcggaattcttccaaaccctcagccgcatcaacacgattctcatcgactttaaccgcgacgtttggggttatatttcattgggttacttcaaacaaaaagtcaaagcaggcgaagtcggttcttccaccatgccgcacaaagtcaaccccatcgactttgaaaactccgagggcaacctcggtatggcaaacgccgtattgggctttttgtccgaaaaactgccgatttcccgctggcagcgcgacctgaccgacagcaccgtattgcgcaatatgggcgtaggcgtgggctatgccgtattgggtttcgccgcccacctgcgcggtctgaacaagctcgaacccaaccccgccgcgcttgccgccgatttggatgccacttgggagctgctcgccgagccgattcaaaccgtaatgcgccgttacggtgtcgccaatccttacgaaaaactgaaagacctgacgcgcggcaaaggcggcatcacgcccgaagtgctgaaaggctttatcggattgctggaaatccccgccgaagccaaagccaaattgcttgagctgacccccgcgctgtatgtgggcaaggctgaagcgttggcgaaacggatttgagcgtttactgaaaccgatgccgtctgaacgcgcgttcagacggcatttttaagataacgggacatacgggggcgatatttatgcaagctgtccgatacagaccggaaattgacggattgcgggccgtcgccgtgctatccgtcatgattttccacctgaataaccgctggctgcccggaggattcctgggggtggacattttctttgtcatctcaggattcctcattaccggcatcattctttctgaaatacagaacggttctttttctttccgggatttttatacccgcaggattaagcggatttatcctgcctttattgcggccgtgtcgctggcttcggtgattgcctctcaaatcttcctttacgaagatttcaaccaaatgcggaaaaccgtggagctttctgcggttttcttgtccaatatttatctggggtttcagcaggggtatttcgatttgagtgccgacgagaaccccgtactgcatatctggtctttggcagtagaggaacagtattacctcctgtatccccttttgctgatattttgctgcaaaaaaaccaaatcgctacgggtgctgcgtaacatcagcatcatcctgtttttgattttgactgcctcatcgtttttgccaagcgggttttataccgacatcctcaaccaacccaatacttattacctttcgacactgaggtttcccgagctgttggcaggttcgctgctggcggtttacgggcaaacgcaaaacggcagacggcaaacagcaaatggaaaacggcagttgctttcatcactctgcttcggcgcattgcttgcctgcctgttcgtgattgacaaacacaatccgtttatcccgggaatgaccctgctccttccctgcctgctgacggcactgcttatccggagtatgcaatacgggacacttccgacccgcatcctgtcggcaagccccatcgtatttgtcggcaaaatctcttattccctatacctgtaccattggatttttattgctttcgcccattacattacaggcgacaaacagctcggactgcctgccgtatcggcggttgccgcgttgacggccggattttccctgttgagttattatttgattgaacagccgcttagaaaacggaagatgaccttcaaaaaggcatttttctgcctctatctcgccccgtccctgatacttgtcggttacaacctgtacgcaaggggggatattgaaacaggaacacctccgcccgttgcccggcgcgccccttgctgcggaaaatcattttccggaaaccgtcctgaccctcggcgactcgcacgccggacacctgagggggtttctggattatgtcggcagccgggaagggtggaaagccaaaatcctgtccctcgattcggagtgtttggtttgggtagatgagaagctggcagacaacccgttatgtcgaaaataccgggatgaagttgaaaaagccgaagccgttttcattgcccaattctatgatttgaggatgggcggccagcctgtgccgagatttgaagcgcaatccttcctaatacccgggttcccagcccgattcagggaaaccgtcaaaaggatagccgccgtcaaacccgtctatgtttttgcaaacaacacatcaatcagccgttcgcccctgagggaggaaaaattgaaaagatttgccgcaaaccaatatctccgccccattcaggctatgggcgacatcggcaagagcaatcaggcggtctttgatttgattaaagatattcccaatgtgcattgggtggacgcacaaaaatacctgcccaaaaacacggtcgaaatatacggccgctatctttacggcgaccaagaccacctgacctatttcggttcttattatatggggcgggaattccacaaacacgaacgcctgcttaaatcttcccacggcggcgcattgcagtagcctgccttcttgtcggatattgcctttggcagcctatgccgctgtttgccgttcggggcggcggcttttatagtggattaacaaaaatcaggacaaggcgacgaagccgcagacagtacaaatagtacggaaccgattcacttggtgcttcagcaccttagagaatcgttctctttgagctaaggcgaggcaacgccgtactggtttttgttaatccactatattttgccgttttgaggccggggtcggaataaccgttttttgatgattttccctccccggctgtgtcatcaaaaccccaattgcctttccaaactctccaccagattgtcatccagtttcaaagcctgcgacaggcgggcgaggaagacggtttctttccgcgacaaatcggcacagaccaaccttgccgccagataggcctccgccgccaacgcctcatcgttgccgacggcggcggcgatgtcttcgatgcttgcgggaaggcggtattcggcggcgagccatgcggcagtttcggggtctgtgccgctttcctgttcgatagtccggcgttcggcttcgtctatcatgccgtctgaagcggcggcggctatcatggtgcgcaatacggtacggctgtatgtttcttcagtttctccggcaggttggaaatcgctttgtgttacggttgcccgccctttgttttgctgccacatctgatagccccggtaggcgaggtagcccaaagcggcggtcgaaccgattttggtgatggttttgcggtttttaccgttcagcagcatggaggcgacaccggcaaccagcgcgcctccgccgaatgaattgagcgggctgtcggagaatgtgttgccttttttttgaaccgtgcttaagacttggttgagcagtcgggtaaagttcatgaatttttcctttctgttgcgggaagggcggtatgtttaccctatccttttaaacggcggcaggccggccaataattgttggccgtaccgctgtgttttgatgcggttgtcgaggatggttacgcggccgtagtcttgttcggtgcggatgaggcggccgacggcctggatgagtttgatgccggcttcggggacggtgatttcgatgaaggggttgccgccgcgctgttctatccagcggttttgggttttttcgatggggttgtcgggcatggcgaagggaagtttggcgatgatgacttgcacgcaggcggtgccgggcaggtcgagtccttcggcaaagctgtcgagtccgaagatgatgctggctttgccttcttctatggcccggtggtgtttttgcaggaggacggctttgggtaattcgccttgtacgagcaagagcggcaggtagtctccgggcaggcgcagggcgacatcctgcatttgtttgcgcgaggaaaacaagacgagcgtgccgatggcttcggtgggcgaaataagcttgggcagccattcgatgacggcggcggtgtgggcttcggggtctttggggctggcgtatatgggggggatgtagagttcgccctgtttttcaaagtcaaaggggcttttgagggcgagggtggtggtttcgggcagccattgcagcccggtttggcgcagcatcaggttgaagttgcccaaggattgcagggtggcggaagtcaataccgcgcctgccgcacgccgccacaggctgttggcaaggtgggatgcgctgctgatggggctggcgttgaaaatgtagtcgtttttgtcgtcggcgcggcgggttatccatttcgccaacggttcttcaccctcgagggggacagtggagagcaaatcccaaaccgcgctgatttgttcgatacgggcgataaaaagaccgaactcgctggtcaggcggtcgaggagcgcgccgtcctgttctttttcgcggcgtgcggcagaaagcgcatcgttcagcccgataacgtgtttgagcaggctgcgcgcagcaatggccgtattggaaacggtggtttcgaggccttcggggattttgccgtcttcccacagccaagtcggttcgctgttggttcgtctgtcgttttcagacacccccagacttaaagacggctcttccgccaaatggaattgccattcatgcaggctgtcgagcaaggatgcggcggcttcgtcggctaggttggcaagttcggctttatcggtcagcgcggcaattttgccggtcagctgcggcagtttttccagcgtccaaacggcaatattccatgaatgttcggcggcaaaacggctgagggcttttttgggcaggtggtgcgcttcgtcgatgcaatagaaactgttttcgggcgcaggcagaatcacgccgccgcccatactgatgtcggcaagcagaagatcgtggttggcaacgacgacatcgacggtttccaagacatcgcgtgctaggtaaaacggacattccggacggttgggacaggcggttttcaggcagccgtggcggtcgttggtcactttgagccaaatcgcgtcatcgattttttccggccaagtgtcgcggtcgccgttgaaccgtcgggcggaaaattcgtcggcgatgtcgcgcagcagcttcaattcttcgggcttgggtttgctgtcccacaagacggcgggggcttcaaagccgagcaggttttgctgggcattgctttgcgtcagtcgatagagtttgtaggggcagagatagcggccgcgccctttggcaagtgcgaaggtcagttccaaaccgcttttttcgaccagaaacggcaggtcgcggtctaccaactgctcctgcaaggcaaccgtcgcgctgctcacaatcagccgcttgccgcgtgtttgcgccatgatgccgccggccaaaaggtaggccaacgatttgcccacgccggtcggcccttcgatcacggcaatgctctcgccttcgcgcttgggcggctcgccgccttcttcgcgcgccaacgtccgcgaaaaagcgttggcaaccgccgcaatcatttcccgctgcgaagcacgcggacggaaaccgggcaggtttttgccgatgttttggtaatggtcgcggatggcgtttttttctaaatcggtgagcatggcgttttgtacggcggtagaagtgggcttattttaacattgcacggaagcggtacaatatcgttgtcggaatggggggtgaggtgaatcgtgcggacgtggttggttttttggttgcagcgtttgaaatacccgttgttgctttggattgcggatatgttgctgtaccggttgttgggcggcgcggaaatcgaatgcggccgttgccctgtgccgccgatgacggattggcagcattttttgccggcgatgggaacggtgtcggcttgggtggcggtgatttgggcatacctgatgattgaaagtgaaaaaaacggaagatattgagtcattcggacgcaatgccgtctgaaacggaagttcagacggcatttgttttaggttgccgtaccgcttagggaataccggcgacaggatgggcgggatagccgtgggtatcgaccgaacaggcaaaccgccaaggcgtgtggacggtgtcggcggacaggtgggcaagctcgggaatgtgccgtctgacaaaggtgccgtcggggtcggttttgtgtgcggcggcggcaatgtcggggcaggtgtgccgtgaggcggcaagccgccagttgccttggttgattgctgcatcgaaatcggtcagctgtcgggcaaaccatatctcgccttcgcggcgggggaggtttaaaacgtggcagaaaaaatccgcgctcaagcgtctcagggcggggtggaggctgccggttttgtgcaaacagcgcatcgcggcatcgataatcggaatgccggtccggccctgctgccaaagcgtcaggcgcagggtgtgttcaggattgccgtctgaagggtcgtcatccgtgtgctgcaaggcaagttgaaggaaaaaatcgcggcggatgatgttgtccgcccacgcgttcagacggcgttcgaggctttcccgcgcgagcaggcgcggcgagatgcagccggcactcaaatacgcgcccatcagcgaagtgtgtttgcgcgaggggaaatcctttaaaacggagtaggaatccgcctgttcgagaaaccgccgccactgccgccaagccgccgtttcgccgctgttttgcggcaggaagatgccgtctgaaagcgcggcaggctgcggggcggaaaggttttcggggaagggttggcggtatgccgcgaataggtccggaccggcggggggctgcttggaaaagcggtcgagccatacttcgcggtagcggtcgaaatcggcatatgccgtgccgccgtcgggtatcaggtcggttttgccgaaaacggcgcggtcgttgacgaaggttaacgcgatgccgtgtttgtccaattcgtgccaaagggcgttgtcggcgagtttgtcggcaaaagtatgggattcgtcggcgatgacggtgcggatattgaggcggacggcgagccggacgagctcggcaggagatgccgccgtgtagagcgggatgccgcgccctgcaagcccttgggcgagttcggcggcggattggcggtagaacgcggcgcggcgagggttgtctgtttcggcatcgtcaatccaaatgccgataatgggcaaacttcggcaacggcggcgcataaggcggcgttgtcgcggatgcggaggttttggcggaaccagacgagcgtgtgtgcggcgcacgtgtccgcataaagggggcgggcggtttcagacggcatttcggcagcctttcctgctggcgattttttcgttcagaaaatcgatgaagctgcggactttcgcgcttaagaatgccctgtctgcataaacggcattcagccggtcggtcgggacggcgtatccgggcagcagcctcaccagcgtgccgcagcgcaaatcgtgttccgccgcccaaagcggctgataaccgatgcacgcgcccgccttaatcatttcgcgcatcatcagcgtgttgtcggtacggatgacgggggtcagttcaagccggtattttttgccgtccgatttgcgggtgaggtcgagtttctgctggttggtgtaggtcggcaggacggcgggcagccccgccacttcttccggcgtttccggcacgccgttgcgcctcaggaaatcgggcgaggcgagcagggcaaattcgatttccgccagtgggcgcgcaatcagcgacggggacagggtttgggaaacgcgcaacgccaaatccacgccttcggcaatcaaatcgacgtggcggttgtccaaaatcagttctaatgccacttcgggataacgttcgcggtattccgccagccagttgcatatctggctgccggcaaaccacagcggcatcgttacgcgcagcagcccctgcggtttttccgtccccccggcggctttttgcgcggcatcgtcgagcgtgtcgagcgcgtaactgcattgccggtagtattcttccccggcttcggtcaggctgaggttgcggctgttgcggtgcaggagtttggcttggacggtgttttccaagtggctgacgtgtttgcttgccattgcggtggagatgccgagcgcgtcggcggcgcgggtgaagccgccgctttggacgacttggcggaaaaccttgaggctgaacagggtgtccatattttcttgtgtggaaaagttgtatcaataaaagcagtatatatttgaaaaggggaaacatctatactctaccgcctgaaatgaagacaaatatcaaaggagcttttatgtccgattgctgcaaccgtatccaaccggttttgctttctgttttgcgtatcgtaaccgcctacctgtttttgttgcacggtacgtcgaaaatcttcgccttccccattgaaatgggcagcggttcgcccggcgggctgttgctgcttgccggtattttagaaattgtcggcggcattttgctggtgttgggcctgtttgcgcgccctgccgcgtttgttttgtccggccagatggcggttgcctattttatggcgcacgcttccggaaatgctttgttcccgattgccaacggcggcgagtccgcagtgctgttctgcttcgtattcctctatatcgcggcggcgggcggcggagcatggtcgctggacaggctgtttttcaagcgtaaagcctgaatcggactgcctaaagtgtattttgttgaatgtttttgaggaaaagaaatgacccgtcaatctctgcaacaggctgccgaaagccgccgttccatttattcgttaaataaaaatctgcccgtcggcaaagatgaagttgtccaaatcgtcgaacacgccgttttgcacacaccttcttcgttcaattcccaatctgcccgcgtggtcgtgctgtttggcgaagagcatgataaggtgtggcaatttgtcgaagacgcgctgcgtgccgtcgtgcctgccgacagttttgaaccgaccgcgcaaaaattgaacctgtttaaggcgggtgcggcaaccattttgttttatgaagatcaaaatgtcgtcaaaggtttgcaggagcagttccctgcttatgccgctaacttccccgtttgggcggatcaggcaaacgcgatggtgcagtatgccgtttggacgacacttgccgcggtcggcgtaggtgcaaacctgcaacattacaatcccttgcccgatgcggcgattgccaaagcgtggaatatccccgaaaactggttgttgcgcgcacaaatggttatcggcggtattgaaggggcggcaggtgaaaagacctttgaacccgttgcagaacgtttgaaagtgttcggcgcataatttcgcggtcaaaaaaatgccgtctgaaccctgttcagacggcatttttcagtatcaggcggcgagttttccgcattctgagacctttgtttacaaatatcatgttcaatatagttaaaagaaattattctcatttcctccgtgaggcaatataattcggttgttttgttaaattgagtataaaaatgaaaatatcatttcatttagctttattacccacgctgattattgcttccttccctgttgctgccgccgatacgcaggacaatggtgaacattacaccgccactctgcccaccgtttccgtggtcggacagtccgacaccagcgtactcaaaggctacatcaactacgacgaagccgccgttacccgcaacggacagctcatcaaagaaacgccgcaaaccatcgatacgctcaatatccagaaaaacaaaaattacggtacgaacgatttgagttccatcctcgaaggcaatgccggcatcgacgctgcctacgatatgcgcggtgaaagcattttcctgcgcggttttcaagccgacgcatccgatatttaccgcgacggcgtgcgcgaaagcggacaagtgcgccgcagtactgccaacatcgagcgcgtggaaatcctgaaaggcccgtcttccgtgctttacggccgcaccaacggcggcggcgtcatcaacatggtcagcaaatacgccaacttcaaacaaagccgcaacatcggagcggtttacggctcatgggcaaaccgcagcctgaatatggacattaacgaagtgctgaacaaaaacgtcgccatccgtctcaccggcgaagtcgggcgcgccaattcgttccgcagcggcatagacagcaaaaatgtcatggtttcgcccagcattaccgtcaaactcgacaacggcttgaagtggacggggcaatacacctacgacaatgtggagcgcacgcccgaccgcagtccgaccaagtccgtgtacgaccgcttcggactgccttaccgcatggggttcgcccaccggaacgattttgtcaaagacaagctgcaagtttggcgttccgaccttgaatacgccttcaacgacaaatggcgtgcccaatggcagctcgcccaccgcacggcggcgcaggattttgatcatttctatgcaggcagcgaaaatggcaacttaatcaaacgtaactacgcctggcagcagaccgacaacaaaaccctgtcgtccaacttaacgctcaacggcgactacaccatcggccgttttgaaaaccacctgaccgtaggcatggattacagccgcgaacaccgcaacccgacattgggtttcagcagcgccttttccgcctccatcaacccctacgaccgcgcaagctggccggcttcgggcagattgcagcctattctgacccaaaaccgccacaaagccgactcctacggcatctttgtgcaaaacatcttctccgccacgcccgatttgaaattcgtcctcggcggccgttacgacaaatacacctttaattccgaaaacaaactcaccggcagcagccgccaatacagcggacactcgttcagccccaacatcggcgcagtgtggaacatcaatcccgtccacacactttacgcctcgtataacaaaggcttcgcgccttatggcggacgcggcggctatttgagcatcgatacgttgtcttccgccgtgttcaacgccgaccccgagtacacccgccaatacgaaaccggcgtgaaaagcagttggctggacgaccgcctcagcactacgttgtctgcctaccaaatcgaacgcttcaatatccgctaccgccccgatccaaaaaacaacccttatatttatgcggttagcggcaaacaccgttcgcgcggcgtggaattgtccgccatcgggcaaatcatccccaaaaaactctatctgcgcggttcgttgggcgtgatgcaggcgaaagtcgttgaagacaaagaaaatcccgaccgagtgggcatccatttgaataataccagcaacgttaccggcaacctgtttttccgttataccccgaccgaaaacctctacggcgaaatcggcgtaaccggtacaggcaaacgctacggttacaactcaagaaataaagaagtgactacgcttccaggctttgcccgagttgatgccatgcttggctggaaccataaaaatgttaacgttacctttgccgcagccaatctgctcaatcaaaaatattggcgttcggactctatgccgggtaatccgcgcggctatactgcccgggtaaattaccgtttctgatgaaatcaggcaaaggctgaaataaaactaaacacattttttcactcaaatcgaacacgccttcaataaaatgccataaaatccgcacattaatctgacacacaagagatacctatgaaactgaaaaccttagctttgacttcattgaccctgttggcattggccgcttgtagcaaacaggctgaaaccagtgttccggcagacagcgcccaaagcagctcatctgctccggcagcccctgctgagttgaacgaaggtgtgaactacactgtattgtctacgcctattccgcaacagcaggccggtaaaatcgaagtattggaatttttcggctacttctgcccgcattgcgcccatcttgagccggtcttgagcgagcacatcaaaacgtttaaagacgatacctatatgcgccgggagcatgtcgtgtggggtgatgaaatgaaacctttggcacgtttggcggccgcagtggaaatggccggtgaatcagataaagccaacagccatattttcgatgcgatggttaatcaaaaaatcaatctggccgataccgataccctgaaaaaatggctgtccgagcaaacagcgtttgacggcaaaaaagtattggctgcatttgaggctcctgaaagccaagcgcgtgcggctcaaatggaagagttgaccaataaattccaaatcagcggcacaccgactgtgattgtcggcggcaaataccaagttgaatttaaagactggcagtccggtatgaccacgattgaccagttggtggataaagtacgcgaagagcagaaaaagccgcaataagttgaggattgaatgagtaaaggccatctgaaaataggatttcagacggccttttgtatttaggctttatagaagagatgattgcttaaagccttatggttttaaatcagaatatatagcggattaacaaaaaccagtacggcgttggctcgccttagctcaaagagaacgattctctaaggtgctgaagcaccaagtgaatcggttccgtactatctgtactgtctgcggctcgccgccttgtcctgatttttgttaatccactataaatcagaatataaaacaaaaacgccgtctgaaatttcagacggcgttttctgttaaatcggcttacaaacccgggaacatcccttttatccccctcattcctttcgccatacgcatcagtttgcccaagccgttgccgctgaacatcttcatcatttgttgcatttgttcaaactgtttgagcaatttgttcacttcctgcacggttgtgcccgcacccattgcaatacggcgtttgcggctggctttgagcagggcagggttggcgcgttctttaggggtcatcgagttgatgatggcttctactttgcccatcgctttttcagccgttccttcggggatttgtttcgagatttgacccagttcgcccggcattttcgacatcaggttttccaaaccgcccatattgcgcatttgctggatttgttctttaaagtcgttgaggtcgaagcctttgcctttgtgcagctttttcgccattttagcggcggcttcttcgtctatacctttttgaacgtcttcaatcagggtcaatacgtcgcccatacccaaaatgcggccggcaagacggtcggggtggaaaggttcgaggccgttgattttttcgccgacaccgataaatttaatcggtttgccggttacgtggcgtacggacaatgccgcaccgccgcgcgagtcgccgtccatcttggtcaatacgactccggtcagcggcagggcttcattaaatgcctgagcagtgttcaccgcatcctgacccagcatcgcatcgatgacgaacaaagtttccaccgggttaaccgccgcgtgaagggctttgatttcgttcatcatctcttcatcgattgccaaacggccggcggtatcgaccatcaatacatcgtaaaaatgttttttggcgtaatcgacggcggcagttgcaatttcaaccggtttttggttggtatcggacgggaaaaaatccacgccgacctgttcggccaacagacgcagctgttcaatcgcggcaggacggtaaacgtcggcggataccaccaaaacctttttcttctgatcgtttttcaacaggcgggcgagtttgccgacggtcgtcgtcttgcctgcgccctgcaaacctgccatcaacacgacggcgggcggcgcaaccgacaaatccagcgttttgttttccctgcccatcagttcggtcagggctttgttgaccacgccgataaatgcctgatccggcgtcaggctgcccgctacttcctgaccgagggccttttctttgacgttgttgatgaactctttgacgacaggcagggcgacatccgcctcaagcagggcgaggcggacttcgcgcaaggcctctttaatattgtcttcggtcagtttggcctgcccccggatgtttttgaagacattgctgaagcggccggttaaattgtctaacatactggtccttggtctgaataagaatagcttgccccatcaggggcattctttgttaaaataaaatcaaaataatttgatgcggcttgtgtgccggacagcatatcggcaaatccgtcaaggcttgaccgaaatggggattttacaattccaacgttaaaagttccaatatttcataagcggccgcatacggcgcaacagtatagatagagaaagtccaccatgccgacagttttcatctttttgacggcggtttacgcaggattgggtgcatttgcatggcactgccaacagcaggggtgcggccgggattacccgtggaagacggaattgccggttttgggtgcggcattgaccgtccacggcgcggcactgcttatgccggtcattcaagacaaaatcatcattatgggcttcgggtattccggcagcctgattgtttggatgatgctgtttatttattttgccggcagcttcttttatccgctgcgcggagtgcagttgctgctgtatccttgcgccgcactgatgctgctgtcaggtttggtttttcctggaaaattctcgggatatgaaattaccgaccttccctttatgctgcatatcggaacttcgctgctcgcatacgggctgttcggcatcgcaacattattgtccgttttgaccctgctgctgaatcggagcctgcaccgcaggagcttctccaagctcgcaggattcctgccgtcgctgctcagtttggaaaaactcatgttccaggccatgtgggcaggtttcatcctgctgacctattccgtcgtcagtggaacattttttgccgaagccgtattcggcaaacccatgacctttacccataaaaccgtattcggcatattgtcatggctgatttacggcggactgctgctcaagcacagcatgaccgcatggcgcggcaaaaaagccgccgtgtggaccatcatcggatttgtcagccttatgattgcctatatgggcagcaagttcgtattggaaatcattctgaaaagataagaagagccaacagatgccgtctgagtccccgagtttcagacagcatattcacaaaggcgcaccagccggaggagggagaggaaaggattgttggaggcggcgcagtatttagcagaaataaaaaaccttatccgacagcgacatgacgaatttccccaaaaaaatcccgctgaaagcattgaccgtttttccctgtgggcgtatagttcggttcttcgctgctgcagaagtggcggacgaactgaaaagtatagcacagaatgttggggatatcgagagatatcttgacaggcggaaggaatactttataattcgcaacgctctttaacaaaacagattaccgataagtgtgagtgccttgagtctcacactgtttgaaagacagacaagataatgttttgaacattgtcctgttggtttctttgaagcagaccagaagttaaaaagttagagattgaacataagagtttgatcctggctcagattgaacgctggcggcatgctttacacatgcaagtcggacggcagcacagagaagcttgcttctcgggtggcgagtggcgaacgggtgagtaacatatcggaacgtaccgagtagtgggggataactgatcgaaagatcagctaataccgcatacgtcttgagagagaaagcaggggaccttcgggccttgcgctattcgagcggccgatatctgattagctagttggtggggtaaaggcctaccaaggcgacgatcagtagcgggtctgagaggatgatccgccacactgggactgagacacggcccagactcctacgggaggcagcagtggggaattttggacaatgggcgcaagcctgatccagccatgccgcgtgtctgaagaaggccttcgggttgtaaaggacttttgtcagggaagaaaaggctgttgctaatatcagcggctgatgacggtacctgaagaataagcaccggctaactacgtgccagcagccgcggtaatacgtagggtgcgagcgttaatcggaattactgggcgtaaagcgggcgcagacggttacttaagcaggatgtgaaatccccgggctcaacccgggaactgcgttctgaactgggtgactcgagtgtgtcagagggaggtagaattccacgtgtagcagtgaaatgcgtagagatgtggaggaataccgatggcgaaggcagcctcctgggacaacactgacgttcatgcccgaaagcgtgggtagcaaacaggattagataccctggtagtccacgccctaaacgatgtcaattagctgttgggcaacctgattgcttggtagcgtagctaacgcgtgaaattgaccgcctggggagtacggtcgcaagattaaaactcaaaggaattgacggggacccgcacaagcggtggatgatgtggattaattcgatgcaacgcgaagaaccttacctggtcttgacatgtacggaatcctccggagacggaggagtgccttcgggagccgtaacacaggtgctgcatggctgtcgtcagctcgtgtcgtgagatgttgggttaagtcccgcaacgagcgcaacccttgtcattagttgccatcattcagttgggcactctaatgagactgccggtgacaagccggaggaaggtggggatgacgtcaagtcctcatggcccttatgaccagggcttcacacgtcatacaatggtcggtacagagggtagccaagccgcgaggcggagccaatctcacaaaaccgatcgtagtccggattgcactctgcaactcgagtgcatgaagtcggaatcgctagtaatcgcaggtcagcatactgcggtgaatacgttcccgggtcttgtacacaccgcccgtcacaccatgggagtgggggataccagaagtaggtaggataaccacaaggagtccgcttaccacggtatgcttcatgactggggtgaagtcgtaacaaggtagccgtaggggaacctgcggctggatcacctcctttctagagaaagaagaggctttaggcattcacacttatcggtaaactgaaaaagatgcggaagaagcttgagtgaaggcaagattcgcttaagaagagaatccgggtttgtagctcagctggttagagcacacgcttgataagcgtggggtcggaggttcaagtcctcccagacccaccaagaacgggggcatagctcagttggtagagcacctgctttgcaagcagggggtcatcggttcgatcccgtttgcctccaccaatactgtacaaatcaaaacggaagaatggaacagaatccattcagggcgacgtcacacttgaccaagaacaaaatgctgatataataatcagctcgttttgatttgcacagtagatagcaatatcgaacgcatcgatctttaacaaattggaaagccgaaatcaacaaacaaagacaaagcgtttgttttgattttttattctttgcaaaggataaaaatctctcgcaagagaaaagaaaacaaacacagtatttgggtgatgattgtatcgacttaatcctgaaacacaaaaggcaggattaagacacaacaaagcagtaagctttatcaaagtaggaaattcaagtctgatgttctagtcaacggaatgttaggcaaagtcaaagaagttcttgaaatgatagagtcaagtgaataagtgcatcaggtggatgccttggcgatgataggcgacgaaggacgtgtaagcctgcgaaaagcgcgggggagctggcaataaagcaatgatcccgcgatgtccgaatggggaaacccactgcattctgtgcagtatcctaagttgaatacatagacttagagaagcgaacccggagaactgaaccatctaagtacccggaggaaaagaaatcaaccgagattccgcaagtagtggcgagcgaacgcggaggagcctgtacgtaataactgtcgagatagaagaacaagctgggaagcttgaccatagtgggtgacagtcccgtattcgaaatctcaacagcggtactaagcgtacgaaaagtagggcggggcacgtgaaatcctgtctgaatatggggggaccatcctccaaggctaaatactcatcatcgaccgatagtgaaccagtaccgtgagggaaaggcgaaaagaaccccgggaggggagtgaaacagaacctgaaacctgatgcatacaaacagtgggagcgccctagtggtgtgactgcgtaccttttgtataatgggtcaacgacttacattcagtagcgagcttaaccgaataggggaggcgtagggaaaccgagtcttaatagggcgatgagttgctgggtgtagacccgaaaccgagtgatctatccatggccaggttgaaggtgccgtaacaggtactggaggaccgaacccacgcatgttgcaaaatgcggggatgagctgtggataggggtgaaaggctaaacaaactcggagatagctggttctccccgaaaactatttaggtagtgcctcgagcaagacactgatgggggtaaagcactgttatggctagggggttattgcaacttaccaacccatggcaaactaagaataccatcaagtggttcctcgggagacagacagcgggtgctaacgtccgttgtcaagagggaaacaacccagaccgccagctaaggtcccaaatgatagattaagtggtaaacgaagtgggaaggcccagacagccaggatgttggcttagaagcagccatcatttaaagaaagcgtaatagctcactggtcgagtcgtcctgcgcggaagatgtaacggggctcaaatctataaccgaagctgcggatgccggtttaccggcatggtaggggagcgttctgtaggctgatgaaggtgcattgtaaagtgtgctggaggtatcagaagtgcgaatgttgacatgagtagcgataaagcgggtgaaaagcccgctcgccgaaagcccaaggtttcctgcgcaacgttcatcggcgtagggtgagtcggcccctaaggcgaggcagaaatgcgtagtcgatgggaaacaggttaatattcctgtacttgattcaaatgcgatgtggggacggagaaggttaggttggcaagctgttggaatagcttgtttaagccggtaggtggaagacttaggcaaatccgggtcttcttaacaccgagaagtgacgacgagtgtctacggacacgaagcaaccgataccacgcttccaggaaaagccactaagcttcagtttgaatcgaaccgtaccgcaaaccgacacaggtgggcaggatgagaattctaaggcgcttgagagaactcaggagaaggaactcggcaaattgataccgtaacttcgggagaaggtatgccctctaaggttaaggacttgctccgtaagccccggagggtcgcagagaataggtggctgcgactgtttattaaaaacacagcactctgctaacacgaaagtggacgtatagggtgtgacgcctgcccggtgctggaaggttaattgaagatgtgagagcatcggatcgaagccccagtaaacggcggccgtaactataacggtcctaaggtagcgaaattccttgtcgggtaagttccgacccgcacgaatggcgtaacgatggccacactgtctcctcctgagactcagcgaagttgaagtggttgtgaagatgcaatctacccgctgctagacggaaagaccccgtgaacctttactgtagctttgcattggactttgaagtcacttgtgtaggataggtgggaggcttagaagcagagacgccagtctctgtggagccgtccttgaaataccaccctggtgtctttgaggttctaacccagacccgtcatccgggtcggggaccgtgcatggtaggcagtttgactggggcggtctcctcccaaagcgtaacggaggagttcgaaggttacctaggtccggtcggaaatcggactgatagtgcaatggcaaaaggtagcttaactgcgagaccgacaagtcgagcaggtgcgaaagcaggacatagtgatccggtggttctgtatggaagggccatcgctcaacggataaaaggtactccggggataacaggctgattccgcccaagagttcatatcgacggcggagtttggcacctcgatgtcggctcatcacatcctggggctgtagtcggtcccaagggtatggctgttcgccatttaaagtggtacgtgagctgggtttaaaacgtcgtgagacagtttggtccctatctgcagtgggcgttggaagtttgacgggggctgctcctagtacgagaggaccggagtggacgaacctctggtgtaccggttgtaacgccagttgcatagccgggtagctaagttcggaagagataagcgctgaaagcatctaagcgcgaaactcgcctgaagatgagacttcccttgcggtttaaccgcactaaagagtcgttcgagaccaggacgttgataggtggggtgtggaagcgcggtaacgcgtgaagctaacccatactaattgctcgtgaggcttgactctatcatttgaagaacttcaagagataaaagcttactgactgattcagtcattaccgaatatattgattaaggctttaccgatttgtaacagtttaagtttggcggccatagcgagttggtcccacgccttcccatcccgaacaggaccgtgaaacgactcagcgccgatgatagtgtggttcttccatgcgaaagtaggtcactgccaaacacccattcagaaaacccccgattattcgggggtttttgctttgcccggaaaaaatgtttgctttgcccggaaaaaatgtcggtgatggcgggacggcatccgtacggtgtccggtcgggtttgcggaggaacggcttgaaactttgggatattcattttagaatgactcgttttatcgtcgcaagatgcggtttattgtttgcaacccttaaaggaaaaaccatgaagaaaatgttcgtgctgttctgtatgctgttctcctgcgccttctcccttgcggcggtaaacatcaatgcggcttcgcagcaggagttggaggcgctgccgggcataggcccggcgaaggcgaaggccattgcggaataccgtgcgcaaaacggtgcgttcaagtctgtagacgatttgaccaaggtaaagggcatcggccctgcggtgctggcgaagctgaaggaccaggcttcggtcggcgcgcccgcaccaaaagccccagccaaaccggtgctgcccgcggataaaaaataggggaacctgtaaaggaaagggcatcggccgccgtcggtgcttttttgtttggaagggaaatggctaaaatatgtagcattatgttctgtatcgttgtttaccgcttccgcacctttgtccgccttaaagcaggtagacaccgcaatgaatcgacgcaaagaaaatgccgtctgaacatgcgttcgggcggcgttttgttggggggtatcggagcggaacgtctgaaaaagggtttcaggcggtctttgggcgtgtggtgacagtcgaaaacgtgataaggctacctgaaaagtttgggagattttcaggtagcctttggtattgggcgcaacagacgcaggtacagattagcggtgtgccgtaatcgtacgaatgccgattcaacctaagcagacatcagtatttaggaagtggatgtttgatggagcaaaggttgtacgaagggtggaaggcaacctgtgggtgtttggtatggtcgcgcttgaaaaaacgtgttttaagggacaaatgccgtctgaaaatcggtttcagacggcattttctgtttatttaaagcaaacaggaaaaggcagcaatattctgcagtcttcctattcacacaagcgttttatagttaattaaaaacaaaatagtacaatactcaactttgaaggtctaaccatggcatactctgcggacttaagaaacaaagctttaaactaggggctgtactagattagcagatatgttaccctcgaaatatgaagataacgcactgcaaattaaagaaaaaagtacagaaagaactgctccgttttttgtgctggaagttaccgcccgttctgccgccgatattttgggtatccatcccaattcggcagtactgttctaccgtaaaatccgcacggttatcaaccatcatttggccttggctgccgatgaggtttttgagggccctgtcgagccggacgaaagcgatttcggcggacggcgtaaaggcagacgtggtcgcggtgcggcaggaaaagtggttgtcttcggcattctgaaacgcaacggacggggctataccgttgtcgtagataatgccaagtctgaaacgttactccctgtcatcaaaaagaaaatcatgccggacagtattgtttataccgatagtctgagcagctgcgacaagttggacgtgagcggttttatccattaccgcatcaaccattccaaggaatttgcagaccgtcagaaccacattaacggcattgagaatttttggaatcaggcaaaacgcgtcttgcgaaaatacaacggaatcgatcgtaaatctttcccgctgttcttgaaagaatgcgaatttcgatttaacttcggcacaccgtctcaacagcttaaaatcctgcgggattggtgtggaatttagggctaatctagtacagcacctaacaaaaaccagtacggcgttggctcgccttagctcaaagagaacgattctctaaggtgctgaagcaccaagtgaatcggttccgtactatttgtactgtctgcggcttcgtcgccttgtcctgatttttgttaatccactatattttagataatgcgtgatttcaccgtatgggtgtcttacgggaaatggcggaaaaattgggacataaggtattgcctcttgcaccttattcacctgagctcaacccgattgagaaagtgtgggcgaatattaagcggtatctgcgaaccgttttgtctgattacgcccgatttgacgatgcactactgtcctattttgattttaattgactatagaacgttgcggctacgcggaagccgtactcgttggatttggagcggcccattttggttttgtcaccgtccaagacaatctcacggggtttgtagattgttttgtgacggtagtatggatcaaactcgagaccgacgctgtcggtcaactgtttgcctacattcagaccgataccgacactccaacctttggcgcttttgctgacatcgcgggaagcacccatctgggtcgtcatcactttggttttgccgcgcaaatctgcatatgcatccgcccaaggggtcagggatcatccgtcccccaaatcttggcggatttcgccatggactttcaaagcaaggttttcatgcttggtaacggtgtttttccttatcgccgatgatggctttgcctttgccgttagactcgggaatatcggctaccgtaacggcggacacggctgcaagtgagagtgcaagcagggttttttcatgtttttcttcctataatgaggataaataaatggaaaaagtgtgggaaatacccgcattcccattaaatcttttttcaagcaatgagttctttttgttttcaacattttccttgagacctttgcaaaaatagtctgttaacgaaatttgacgcataaaaatgcgccaaaaaattttcaattgcctaaaaccttcctaatattgagcaaaaagtaggaaaaatcagaaaagttttgcattttgaaaatgagattgagcataaaattttagtaacctatgttattgcaaaggtctctccttgtgtatgaaattttgccggatgtgaaggcggaatcggcagcgggggtgttctgtaccggattgtcgtggaaatgggaaaacggatgttccgtgcaggtttgtccaaatgaatggcgggtattgtttttatcaatctgtttctttttatttgaaataaaatttctaaaataataaaaatatgaaatttaaaatctataaaaaaagatatatcagttattttgaaataaaatagctttgtagtaatatgttgcacttgtttgtgcaaggtaaacgatgtaacctaagccgcgtataaaaacccatcaggaaagatgcaagatgacacaccattaccccacagacgatattaagattaaagaagttaaagagttgttgccgccgatagcccatctttacgagctgccgatttccaaagaggcttcgggcttggttcaccgcacccgtcaggaaatttccgatttggttcacggcagggacaagcggctgttggttattatcgggccgtgttcgattcacgatccgaaagcggcgttggaatatgcggagcgtttgttgaaactccgcaagcagtatgaaaacgagcttttgattgtgatgcgcgtttatttcgagaagccgaggacgacggtgggttggaaaggtttgattaacgacccgcatttggacggtacgtttgacatcaatttcggtttgcgtcaggcgcgcagcctgttgttgtcgctgaacaatatgggtatgcctgcctctaccgagtttttggatatgattacgccgcaatattatgcggacttgatttcttggggggcaatcggtgcgcggacgaccgaaagccaagttcaccgcgaattggcaagcgggctgtcctgccccgtcggctttaaaaacggtacggacggcaatttgaagattgccatcgacgcaatcggtgcggcgagccattcgcatcatttcctgtctgtaaccaaggccgggcattccgccattgtccataccggcggcaatcccgactgtcatgtcattttgcgcggcggcaaagagccgaattatgatgcggaacacgtcagcgaggcggcggaacaactgcgtgcggcaggggtaaccgacaagctgatgatagattgcagccacgccaacagccgcaaggattacactcggcagatggaagtggcacaagacattgccgcccaattggaacaggacggcggcaatatcatgggcgtgatggtggaaagccatttggtcgaaggcagacaggacaagccggaagtgtacggcaagagcattaccgatgcgtgtatcggttggggcgcgactgaagaactgttggcattgttggcaggtgcaaacaaaaaacgtatggcgcgcgccagttgagatttttgacgcagaatgtcataaaatgtcgtctgaagcgttcagacggcatttttgtggaggaaatatgctcaaaataaccctaattgcggcgtgtgcggaaaacctgtgcatcggggcgggcaatgctatgccttggcacatccccgaagatttcgcatttttcaaagcctataccttgggcaaacccgtcattatggggcggaaaacgtgggaatccctgcccgtcaaacccctgcccggacggaggaacatcgtcatcagccggcaggcggattattgcgcggcaggcgcggaaacggcggcaagtttggaggcggcattggcattgtgcgcaggcgcggaagaagccgtcattatgggcggcgcgcagatatacggacaagcgatgccattggcgaccgatttgcggataaccgaagtggatttgtctgtggaaggagatgcatttttccccgcaatagaccggacgcattggaaagaagcagagcggacggaacgccgtgtcagcagcaaaggcacgcgctatgcttttgtgcattatttgagatattgaaatataaactctctataaaatcccccgcaaatgatgggctgaaatagaaaatattgttattcccccgaagatgggaatccgggattttaaagttagggtaatttatccgaaataacaacaatcttccatcgtcattcccgcaaaagcgggaatccggaaacgaaaagctaaagcaatttatcggaaaaaaccgaagtttaaagaaccggattcccgcctgcgcgggaatgacgagattttaggttatggggatttattgggaataatggaacaaagaaagcagaaataaggatatagaggctgtctttggatttgcgatggttgtcggagaatgccgtctgaagccgtttcagacggcatttttccagcttgagaacggatgcctgctcaaataagcattggtaaacataccgtcggcagtgatttcccgtcccagccagtccggacggtcaaaatcggcattctcgtcgggcaactcgatttccgcgacgaccaaaggcgcattatcgccaagaaaaacatcgatttcaaacaggctgccgccccatctgaccggataacgccatttttccattttaaacgggcacatcgtttccatcatcttttccgcatcggcaagcgggatttcgtattcaaactcactgcggctgatttccgaaatatagcctttcagcgtcagccacgcctgttttccggcaatgcggacacggacggtgcgttctttttcaacagacagataaccctgcctcaacagcagcggttcgtcggcgtattgccgccagttgtcgtttccaatcaaaaaacggcgttcgatttctatcggcataagatgctccgtcaaaacggtttgaacacgaccagatacagcgcggcaaccatcagcagcacggggatttcgttgaacacgcggtaccagcggtgtgaaaaagcattgctgtaatcctgaaaacggcgcagcagcacgccgcaatacaactggtaagccaagagcatcaagcccaaacacagtttgacgtgtacccagccgctgccccaccagccggcggcaaacggtatcgccgcgccgaacacgaccgcgccgaagcccaacggcgacataaaacggtacagccgcaccgccatgcccgacagacgcacatactcgggattgccgcgcggcacatcaatcatcgccatattgacgaaaatcctcggcaggtaaaacagccctgcaaaccacgaaatgacaaaaaacaagtgaaacagcttgaaccaagaaaacatcatcgcccacaccctgccgaaaagcggtattgtacaggcaaaccgcttgggaaacgtgataaaatcaggcggataaacaaatcgaataaatccttaccgcaaaacggaggcaaaatgctcaaatccatcgaactcaattcccacatccgcaaccgccttgcagaatatctgaaaggcaggggtatggattttcagacggcaatgcaggaagaaaaaggcaacaaagaaatcgccgccatcgtccacagcggtttgcccactctggtccgcaaactgtattccgaacaaaaaatgcagaagtttttttgggaaaagcgggatttgattgccgactacatcagccgccggatgcagggataggtggctgaaatctgttttcaggcaagtgaaaagacaatatggcagattgaaattacgcttatcgtcattcccgcccgcgcgggaatccgacttgtttggtttcggttatttttcgtttcgtaacttttgagccgtcattcccgcgcaggcggtaatccggcttgttcggtttcggttctttttctcgtttcgggtgatttctaaaccgtcattcccgcgcaggcgggaatctaggtctttaaacttcggttttttccgataaatttttgccgcattaaaattctagattcccgctttcgcgggaatgacggcggagggtttttagttttcccgaaaatgcacatcatccaaaatcccgttattcccacaaaacagaaaatcaaaaacagcaacctgaaatcccgtctttcccgcgcaggcggtaatctgaacacgtccgtagtgaaacctatatcccgtcattcgcacgaaagtgggaatccaggatgcagggaaaaccgttttatccgataagtttccgcaccgaaaggtctagattcccgctttcgcgggaatgacggcggagggtttttagttttctcgataaatgcacatcatccaaagtcccgttattcccacaaaaacagaaaatcaaaaacaacaatctgaaattccgtccttcccgcctgtgcgggaatccggcttgttcggtttcggttctttttctcgtttcgggtgatttctaaaccgtcattcccgcgcaggcgggaatctaggtctttaagcttcggtttttcttgataaattcttgccgcattaaaattctagattcccgctttcgcgggaatgacggcggagggttttttgttttcccgataaatgcacatcatccaaagtcccgttattcccacaaaaacagaaaatcaaaaacagcaacctgaaatcccgtccttcccgcgcaggcggtaatctgaacacgtccgtagtgaaacctatatcccgtcattcgcacgaaagtgggaatccaggatgcagggaaaaccgttttatccgataagtttccgcaccgaaaggtctagattcccgctttcgcgggaatgacggcggagggtttttagttttctcgataaatgcacatcatccaaaatcccgttatttccacaaaacagaaaatcaaaaacagtaacctgaaatcccgtcattcccgcgcaggcgggaatccggcttgttcggtttcggttctttttcttgtttcgggtgatttctaaaccgtcattcccgcgcaggcgggaatccagacctttaaaccccgaccatccttgataaattcttgcggcattaaaattctagattcccgctttcgcgggaatgacggcggagggttttttgcttttcctgatttttcattgcgatgtagtataatgtagtatataatcattataattttaacacttgacaaaggaaaatttctcatgacactgaaagcaagcaagcaagcaagcaagcaagcaagcaagcggtcgggttaatctattaacattatctgttttatcgctgttttgcacgccatatgtttgaggttcggatgcgtacgatcccgtcaaagaagccgagattaaaaacaaatttattttagaagcggcggaagacagaaattcccacgtttggcgcggcccgtgcagcatatcttttgattgcttcggtatgttcagagctcagcttggttcaaatactcgttctaccaaaatcggcgacgatgccgatttttcattttcagacaagccgaaacccggcacttcccattatttttccagcggtaaaaccgatcaaaattcatccgaatatgggtatgacgaaatcaatatccaaggtaaaaattacaatagcggcatcctcgccgtcgataatatgcccgttgtcaaaaaatatattacagagaagtatggggctgatttaaagcaggcggttaaaagtcaattacaggatttatacaaaacaagaccggaagcttgggcagaaaataaaaaacggactgaggaggcgtatatagcacagtttggaacaaaatttagtacgctcaaacagacgatgcccgatttaattaataaattggtagaagattccgtactcactcctcatagtaatacatcacagactagtctcaacaacatcttcaataaaaaattacacgtcaaaatcgaaaacaaatcccacgtcgccggacaggtgttggaactgaccaagatgacgctgaaagattccctttgggaaccgcgccgccattccgacatccatacgctggaaacttccgataatgcccgcatccgcctgaacacgaaagatgaaaaactgaccgtccataaggattatgcgggcggcgcggatttcctgttcggctacgacgtgcgggagtcggacgaacccgccctgacctttgaagacaaagtcagcggacaatccggcgtggttttggaacgccggccggaaaatctgaaaacgctcgacgggcgcaaactgattgcggcaaaaacggcggattccggttcgtttgcgtttaaacaaaattaccggcagggactgtacgaattattgctcaagcaatgcgaaggcggattttgcttgggcgtgcagcgtttggctatccccgaggcggaagcggttttatatgcccaacaggcttatgcggcaaatactttgtttgggctgcgtgccgccgacaggggcgacgacgtgtatgccgccgatccgtcccgtcaaaaattgtggctgcgcttcatcggcggccggtcgcatcaaaatatacggggcggcgcggctgcggacgggtggcgcaaaggcgtgcaaatcggcggcgaggtgtttgtacggcaaaatgaaggcagccgactggcaatcggcgtgatgggcggcagggccggccagcacgcatcagtcaacggcaaaggcggtgcggcaggcagtgatttgtatggttatggcgggggtgtttatgctgcgtggcatcagttgcgcgataaacaaacgggtgcgtatttggacggctggttgcaataccaacgtttcaaacaccgcatcaatgatgaaaaccgtgcggaacgctacaaaaccaaaggttggacggcttctgtcgaaggcggctacaacgcgcttgtggcggaaggcattgtcggaaaaggcaataatgtgcggttttacctacaaccgcaggcgcagtttacctacttgggcgtaaacggcggctttaccgacagcgaggggacggcggtcggactgctcggcagcggtcagtggcaaagccgcgccggcattcgggcaaaaacccgttttgctttgcgtaacggtgtcaatcttcagccttttgccgcttttaatgttttgcacaggtcaaaatctttcggcgtggaaatggacggcgaaaaacagacgctggcaggcaggacggcactcgaagggcggttcggtattgaagccggttggaaaggccatatgtccgcacgcatcggatatggcaaaaggacggacggcgacaaagaagccgcattgtcgctcaaatggctgttttgatgcgtcgggaaatgttttgacgcacaggcggtacaccggcacggcaccgcgcgccgccccgcaaaccaatccgaaccctgccgccccgaagggcggggcataatgatgaaaccggcggaaaaccgccggttttttgccgccgtttgaaacccgattctggcttcagacggcattgtcgcggcatcgggcggcagggtttggaacagcggcataaaaaactgatacaatccgccgattgataatggttattttttatttttgtgggaagacatttatgcctgcacgaaacagatggatgctgctgctgcctttattggcaagcgcggcatatgccgaagaaacaccgcgcgaaccggatttgagaagccgtcccgagttcaggcttcatgaagcggaggtcaaaccgatcgacagggagaaggtgccggggcaggtgcgggaaaaaggaaaagttttgcagattgacggcgaaaccctgctgaaaaatcccgaattgttgtcccgcgcgatgtattccgcagtggtctcaaacaatattgccggtatccgcgttattttgccgatttacctacaacaggcgcagcaggataagatgttggcactttatgcacaagggattttggcgcaggcagacggtagggtgaaggaggcgatttcccattaccgggaattgattgccgcccaacccgacgcgcccgccgtccgtatgcgtttggcggcagcattgtttgaaaacaggcagaacgaggcggcggcagaccagttcgaccgcctgaaggcggaaaacctgccgccgcagctgatggagcaggtcgagctgtaccgcaaggcattgcgcgaacgcgatgcgtggaaggtaaatggcggcttcagcgtcacccgcgaacacaatatcaaccaagccccgaaacggcagcagtacggcaaatggactttcccgaaacaggtggacggcacggcggtcaattaccggctcggcgcggagaaaaaatggtcgctgaaaaacggctggtacacgacggcgggcggcgacgtgtccggcagggtttatccggggaataagaaattcaacgatatgacggcaggcgtttccggcggcatcggttttgccgaccggcgcaaagatgccgggctggcagtgttccacgaacgccgcacctacggcaacgacgcttattcttacaccaacggcgcacgcctttatttcaaccgttggcaaaccccgaaatggcaaacgttgtcttcggcggagtgggggcgtttgaagaatacgcgccgggcgcgttccgacaatacccatttgcaaatttccaattcgctggtgttttaccggaatgcgcgccaatattggatgggcggtttggatttttaccgcgagcgcaaccccgccgaccggggcgacaatttcaaccgttacggcctgcgctttgcctgggggcaggaatggggcggcagcggcctgtcttcgctgttgcgcctcggcgcggcgaaacggcattatgaaaaacccggctttttcagcggttttaaaggggaaaggcgcagggataaagaattgaacacatccttgagcctttggcaccgggcattgcatttcaaaggcatcacgccgcgcctgacgttgtcgcaccgcgaaacgcggagtaacgatgtgttcaacgaatacgagaaaaatcgggcgtttgtcgagtttaataaaacgttctgattgctgttccttttcggaggaaaccctgccggcggcggtatcacggcgggcatcggcggctttcgggcggtgctttgcgtgccgccgcgtgtgcggaaacgcattccggtttttccggcataacggcgatgcgaggtaaaatgccgtctgaaacccgattcgggcttcagacggcattgtcgcggttgcggcgggcgggttcaccagattccgtcaaaggttttcgcgccgcgccaaaatttccacctgtcggcgggtttgaaggtcagcgtaccgccgtgttgtccgtccgtggtgatgtccagccgtttgattttgccggtgcggacggcttcgtagattggtgcgaaccagcgttcttcccactgctgcaatattgccgcataccgctccctgtcccctgtcagggcggtcaggcgcaaatcgtccataaacaggatatggtgcgtgtcgggcaggtgtgccgccgtttcttcataggcgcggaagttgtcgggtaatgcgcggcggtcggagtggaaacggctccaaaccgtatcggcgaaaagcgtgccgccttgcgcgccgccgtttgtgccgtcccaaagccataagccgttcaactcgggcagcccgcgtttcttgcggttatggttgacggggtgcgccgccagccacatttggatttcggtttggacgcgcagccattccaacgcatcttctccgtccggctgatcgtcagcgcccaacaatccgcccaagtccaaaacgggcttcgcgccccagcggtacgcgcaaggaagggaaaccagccataattcgggcaggacgggaacgaaacgccatggaatgtcgccgtaaaacgccgacaggtcgcggcagatccgttccgcttcatccgtaccgacgttcagatattccgccgttagcacatttgcctgatgcatccccatcttttgccagacgggcgtggcgagcgcgacggcttcagacggcatattcaggctttgcgccgcgcgttccaccagtctgccgcaccacaaataacgcgcgtaaaatgccgaagccgtgcagctttggcggtgcagcgagccgtattgcaggattttgttgaaagcgtgcaggcatagaggtattcggatttcgtcttcatccaaattgagcgagggaatggcgagggtgagtttcatcgtttgacgtttcagaaatgcaggtcaggcgcaacattatagaggattcggcgcaaacgccgtcaaaaaggaacaatatggctgtcttcccactttcggcaaaacatcggaaatacgcgctgcgtgcgcttgccgtttcgattattttggtgtcggcggcatacattgcttcgacagagaggacggagcgcgtcagaccgcagcgcgtggaacaaaatctgccgccgctgtcttggggcggcagcggcgttcagacggcatattgggtgcaggaggcggtgcagccgggcgactcgctggcggacgtgctggcgcgttcgggtatggcgcgggacgagattgcccgaatcacggaaaaatatggcggcgaagccgatttgcggcatttgcgtgccgaccagtcggttcatgttttggtcggcggcgacggcggcgcgcgcgaagtgcagttttttaccgacgaagacggcgagcgcaatctggtcgctttggaaaagaaaggcggcatatggcggcggtcggcttctgaggcggatatgaaggttttgccgacgctgcgttcggtcgtggtcaaaacgtcggcgcgcggttcgctggcgcgggcggaagtgcccgtcgaaatccgcgaatccttaagcgggattttcgccggccgcttcagccttgacggtttgaaggaaggcgatgccgtgcgcctgatgtacgacagcctgtatttccacgggcagcaggtggcggcgggcgatattttggcggctgaagtcgttaagggcggcacaaggcatcaggcgttctattaccgttcggacaaggaaggcggagggggcggcaattattatgatgaagacggcaaggtgttgcaggaaaaaggcggcttcaacatcgagccgctggtctatacgcgcatttcttcgccgttcggctaccgtatgcaccccatcctgcacacatggcggctgcacacgggcatcgattatgccgcaccgcagggaacgccggtcagggcttccgccgacggcgtgattacctttaaaggccggaagggcggatacggcaacgcggtgatgatacgccacgccaacggtgtggaaacgctgtacgcgcacttgagcgcgttttcgcaggcggaaggcaatgtgcgcggcggcgaggtcatcggttttgtcggttcgaccgggcgttcgaccgggccgcacctgcattacgaggcgcgcatcaacgggcagcccgtcaatcctgtttcggtcgcattgccgacaccggaattgacgcaggcggacaaggcggcgtttgccgcgcagaaacagaaggcggacgcgctgcttgcgcgcttgcgcggcataccggttaccgtgtcgcaatcggattgaagtttgaaccggcgacgaaaacaatgccgtctgaaaacctgcaaacaggttttcagacggcatttatagtggattaacaaaaatcagtacggcgttgcctcgccttagctcaaagagaacgattctctaaggtgctgaagcaccaagtgaatcggttccgtactatttgtattgtctgcggcttcgtcgtcttgtcctgatttttgttaatccactatgcagttgattaaaacaaaactaagccaaggaagcactgccgtcattcccgtacgggcgggaatcctgacaccacggcacggaaacccatccgctgtcattcccacgaaagcgggaatctagaaatacaacgcggcaggagtttatcggaaatgactgaaacccaacgtaccggattcccgctttcgcgggaatgacgaagtgggcgggaatccggatttatccgttccgacagtgtttgcaaataaaagaaaacccaaccgtcccgattcccggcagggctgttttacggattttgcagcgagggcgcggggcggtcttgcgcctgtttggtttgcagggttgtcagttttttcgtcagcagattcagtatcacgccgtaggcgggcaggaagaagagggtgcagacggtaagtttgaacaggtaatcgacaaaagcgatgccctgccagtttgccgccataaatccatcgctgcttgcgtagaaggcaacggcgaaaaataccagcgtatccaaggcgttgccgatgacggttgatgcggtcggtgcaatccaccacgctttcagacggcgtaatttgttgaatacaaaaatatcaaggatttgtccgatcgcgtaggcggcaaagctggctaaggcgatgcgtccgacaaaggtgttgaattcggacagcgcgcccaagcctgtccaactgccgttgtggaacaaaacggaaaagacgtaggaaagcaaaagggcggggaacatcacccaaaagataatccgccgtgccaagtgagaaccgaaaatgcggacggtcaggtcggtggcaaggaagatgaagggaaaggaaaatgcgccccaagtggtgtggatgccgaaaatttggaaagggaactgcaccagatagttgctggcggcgatgatgaggatatgaaaaagcaccagccggaagagtgccttctgttgctgtgcggcggtaaatgcgtacataaaaatctttcggaaaggcgttcagacggcatatcgtatcgaaggaatgccgtctgaaatatgggaaggatggtttattgtgcgtcgtgctcaaacaagcgtttgcgtgccaatgtttcgaactcggtgcctgcttttccgtagttggcaaacggatgaatggcgatgccgccgcgcggtgtgaactcgccgaatacttcgatgtatttcggatccatcagggcaatgaggtctttcatgatgatgttgacgcagtcttcatgaaaatcgccgtggttgcggaagctgaagaggtagagtttcagggatttgctttccaccattttgatgtgcggaatgtagcggatgtagatggtggcgaagtcgggctgcccggtcatggggcagaggctggtgaactcgggacagacgaatttgacgaaatagtcgttgtcgggatgtttgttgtcgaatgcttcgagaatttcaggcgcgtagccggtcggatattgggttttttgattgcccaaaagagagatgccttgcagctcttcgttgttgcgggacatgagggtttccttagttttttaatgtgggaggttttcgaaccacgggcggcgattgtaatataagcggcggtatctgtgtagttttcttcagacggcatggtttggacggcggcgttttccgtgtcatatatagtggattaacaaaaaccagtacggcgttgcctcgccttagctcaaagagaacgattctctaaggtgctgaagcaccaagtgaatcggttccgtactatttgtactgtctgcggcttcgccgccttgtcctgatttttgttaatccattatataaacgaaatatattttcagttttgccgcctgaagcgttgttttttgaatattgcatctaaaatactgacttgattgcgttattgcgcggatatagaatctgcttcctattgaaagaacattgtttatatgaaatcaggaaattcggaacccaatcttatggatacgcacacggacgaaacaaaacttcaaaacacgcaagccaaacgcaaacgccgcctgacggcattgacgctgctgttcgcgcttgccgccgcagccgccgggtcggcgttttttttatggtggcagcacgaagaggaaacggaagacgcttatgttgccggacgcgtggttcaggttacgccgcaaaagggcggtacggtgcggaaggttttgcacgacgatacggatgccgtgaaaaaaggcgacgtgctggcggtattggacgacgataatgatgtgctggcttacgagcgggcaaaaaacgagctggttcaggcggtgcggcaaaaccgccggcaaaatgccgccacttcgcaggcgggggcgcaggttgccttgcgccgggcggatttggcacgcgcacaggatgatttgcgccgccggtctgctttggcggaatcgggcgcggtgtccgccgaagagctggcacacgcccgtgcggcagtgtctcaggcgcaggcggcggtcaaagcggctttggcggaagaatcttcggcacgtgcggctttgggcggtcaggtttctttgcgcgaacagccggcggttcagacggcaatcggcaggttgaaagatgcgtggttgaaccttcagcggacgcaaatccgcgcgccggcggacggtcaggtggcgaagcgttcggtgcaggtcgggcagcaggtggcggcaggcgcgccgctgatggcggtggtgccgctgtcggatgtgtgggtggatgctaattttaaagagacgcagttgcggcatatgaaaatcggacagcctgccgagctggtgtccgatttgtacggcaaacaaattgtttatcgcggcagggtggcaggtttttcggcaggtacgggcagcgcgttttcgctgattccggcgcaaaacgcaacgggcaactggattaaagtggtgcagcgcgtccccgtccgtatcgtgctgaaccgcgaagatgtggacaggcatccgttgcgtatcggtttgtcgatgacggttaaagtggatacttccgccgcaggcgcgcctgtttcaaaaacgccgggtgcggcattgccggaaatggaaagtaccgactggtcggaagtcgatcggacggtcgatgaaatcctcgggcaatccgcgccctgatgccgtctgaaacggaggacacaatggattatccaccgcttaagggtgcggcattggcgtgggttacgctgtctttggggcttgccgtatttatggaagttttagatacgactatcgccaatgtcgccgttcccgtcatcgccggcaacctcggtgcggcaaccactcaggggacgtgggtcatcacttccttttctgtggcaaacgccgtttccgtgccgctgacgggctttttggcaaaacgcatcggcgaggtcaaattgtttaccgccgccgctgtcggtttcgtcatcacatcgtggctgtgcggtattgcccccaaccttcagtcgctggttgttttccgcatcttgcagggctttatcgccgggccgctgattcccttgtcgcaaagcctgttaatggcatcctatccgcccgcaaaacggacgctggcactggcattgtgggcaatgaccgtcgttgtcgcccctgttctcgggccgatactcggcggctggatttccggaaactggcattggggttggattttcttcattaatatccctatcggtatcatatcggcatggattacatggaaacatttgaaatatcgggaaacggaaaccgttaaaatgccgaccgactatgtcgggcttacattgatggtagtcggtatcggcgcgttacagatgatgctggacaggggtaaggaactcgactggttcgcctctggagaaatcattaccttgggcgtagtcgcactggtgtgcttgtcgtattttattgtttgggaattgggagaaaaatatccgattgtcgatttatcgctgtttaaagatcggaattttaccgtcggcgtcattgccacgtcattgggttttatggtgtatatggggacgctgaccctgctgccgttagtgttgcagaccaacctgggctatacctccacgtgggcagggcttgccgccgcacctgtcggcatcctgcctgttttcctgtctccgttaatcggcaggttcggcaataaaatcgatatgcgcctgttcgtaactgccagcttcctgacctttgcctttactttctattggcgtacggatttttatgccgatatggatattggcaacgtcatctggccgcagttttggcagggtgtcggtgtcgccatgttttttctgccgctgaccaccatcacactgtcgcatatgaagggcgggcagattgccgccgcaggcagcctgtcgaatttcttgcgcgtgctgatgggcggtgtcggcgtatccgtcgtcagcaccctgtgggaacggcgcgaagcgttgcaccacacacgctttgccgaacacatcacgccctattccgcaacattgcacgaaacggccgctcatttgtcccagcacggcgtttccgacattcaaaccctaggcatcatcaacaataccattacccagcagggttttattatcggctcgaacgaaatctttatggcgggcagcttgttattcattatcatgatacccgtcatatggctggcaaaaccgccgttccacaacggcggcggcggtggacattgagggatttgaaaacttgaaatgccgtctgaaaatactggaaatatgttcggacggcattttgaatgcagcagttcccgaaatccgctataatcgcgccccatctgtttcgcacctgcaaacgttccacagatgcgacaatcggaaggattatccgcgcaaaacagccgtttttctttaaaacacttgaactaacactgtttttcgtggtataaatcgcgttttactattttagaagtttggagactgattatggcacgagtttgcaaagtgaccggcaaacgcccgatgtccggcaacaacgtatcgcacgccaacaacaaaaccaaacgccgttttttgcccaacttgcaatcacgtcgtttttgggtagaaagtgaaaaccgctgggttcgcctgcgcgtttccaacgctgcactgcgtaccatcgacaaagtaggcattgatgtcgtattggctgatttgcgtgctcgcggcgaagcttaatttaaacactatttaattaaggattactgcaatgcgcgataaaatcaaactggaatccagtgcaggtactggtcacttctacaccactaccaaaaacaaacgcactatgcccggcaaattggaaatcaaaaaatttgacccagttgcccgcaaacacgtagtgtataaagaaactaaactgaaataatttcagtttgaaagcaaagcctccgactgctcggaggctttgttatttttatcgtgtttcctttccgcttgaaacatctgccgtatgcgaatctgctgcaaaccgtctgccaaggatatgaaaaccgcaaaacggttcataacacaaaaatgccgtctgaaacgtttcagacggcatttcggcagttttcaaccggtcagttgtttggtgatcagtttcttcagcggtgggaaattgttgctggcacgcaataccaagccgcgcaacagttttgccggtgcggtctcattggtaaacagtttcagcatcatattggttccgtgataaagcggatgggcgtgcagcatatgtttgctgctgtatttttccaataatgaagatgcaccgatgtcttgaccgcgctgttcggcttcgagtatcagttttgccaaaatatctgcgctggaaagccccaagttgaaaccgtgtgctgtaacggggtgcataccgacggcggcatcgccaatcagcgcgctgcgtttgccgtagaaacgtttggcaatcatgccgacaagggggtaatggtggatgctgctgaccaattccatatcgccgagcctgcccttgagctgttcttttacgcttgccgccaattcttcgggcgaaaggttttgaacgctgttgattttatcggtatcgacggtaatgacggtattggtcaggtgctcttccagcggcagcagtgcgatggtgcgtccgtaatggaagcattcgtaagcggtatgttggttggaaagggtatgtttcatacggcagacgaacatggttcggctgtaatcgtgcatatcggaggagataccgagttgtcgacgggtttgcgagaagcggctgtctgccgccaaaagcaggcgtgcagtcagtattttgccgttttccaaaatgacttgtgcttcgttgtcagatgttttgacttctttgacaaccgtatcggtcagaatgctgacattgtcgagttgtgatacgacttcataggcggcgcggcggatattgtggttggaaatcagatagcccaaacagtcggcaggttcgccgcgcgcttcagtcggttggggaaagtggagctggtagtcggaacgtccgttcagcactttggcatcgcgcaaagggtagatttcgttttcgggaattttgtcccacatacccaaacgctgcatgatttcgcgggaaaaatgggtcagggcgatttcgcgtccgtcatatggaggattttgcagaacagtcagtgggctgcgttcgatcagggtaactttcaaaccgctgccggcaagttcggctgcaaaacttaaacccgccgggcctgcgccgacgacgaggatgtcgctgtgtaaactcataaaatatcctttgcatagacggatgccgatgatttcagacggtatttgtaagggtttgaatgccgtttgaactatctgtaacagataggcgattatatcaaaacccactgttgaagaaatatgcaggggagggtgtatgcggatttttactttcagcttaatgtgtatcaaatcgggtgtggggtatgtatagtggattaaatttaaaccagtacggcgttgcctcgccttgccgtactatttgtactgtctgcggcttcgtcgccttgtcctgatttttgttaatccactataaaaagccgcatcgtgaaaagatgcggcttcaggtatcggttggattattcttcagaaccggtgtaaggacggatgctgacagttttacggttcagcgcgcctttggttttgaattcgacataaccgtcaactttggcgaacaaagtgtggtctttgcccatacctacgttgtcgcctgcgtggaatttggtaccgcgttggcgtacgatgatggaacctgcgggaatcagctcgttgccgtaggctttaacgcccaagcgtttggcttctgaatcgcgaccgttgcgggtgctgccgcctgcttttttacttgccatttgtaatgctcctaagttttaaggttaggcgattgccacgatttcgatttgggtgaaattttggcggtggccttggcgtttttggtagtgtttgcggcggcgcattttgaagatgcggactttttcgccacgaccgtgtgccactactttagccgttacttttgcaccttcgataaagggtgcgccaacttttacagattcgccgtcagcaatcatcaaaacttcggtcagttcgatttggctgtcgagttcggctggtatctgttctactttcaatttttcgccgacggaaactttatactgtttgccgccggtttttacgaccgcgtacatactcaactccataagggttatggttaatatccgcacaccattgtgcggaactcggcattgtattgttatttgcctgttttgtcaaagtttgcgcggttcggataaccatatgccgtctgaaaagatgtaccctgatggctttgctgatataattgcccgctatttgaatcagctttcaagcggtatctgccgtttgacggaaacgtaaacctgagagtctgccatgctcgagaatctgccctatttccagcgacatctgcctgaagaccttgccaaagtcaatgaagtcatcaaccgtgcggtgcaatccgatgtcgcactgatttcgcaaatcggtacatatatcatcagcgcgggcggcaaacgcctgcgtccgattatgacgattttggcgggtaaggcggtcggttatgatgacgagaaactgtattcgctggcggcgatggtcgagtttatccacacttccaccctcctgcacgacgatgtcgtcgatgaaagcgatttgcgccgtgggcgggcaacggcaaacaatctgttcggcaatgcggcggctgtgttggttggcgactttttatacacgcgcgcctttcaactgatggttgcctcgggcagtatgcgcgttttggaagtgatggcggatgcaaccaacattattgccgagggcgaagtcatgcagctgatgaacatcggcaatacggacattaccgaagaacaatatatccaagtcatccaatataaaacggcaaaattgtttgaagctgccgctcaagtcggcgcaattttgggcaaggcttcccccgaacacgaacgggcgttgaaagactacggtatgtatgtcggtacggcattccaaattattgacgatgtgctggactattctggcgaaaccgaagaaaccggcaaaaacgtcggcgacgatttggcggaaggaaaaccgactttgcctttgatttatctgatgcgtcagggttccgaacaggttgcgaacgatgtgcgtactgctttggaaaatgcagatcgcagctattttgagaaaatccacgattatgtcgtccgttcggatgcgttggcatattcgataggcgaggcgcgcaaagcagtcgattgtgccgttaccgccttggatgccctgcccgacagcgaagtgaaggatgccatgattcagctggcgaaggaatctttggtcagggtgtcttgaggcgatgaatttcagttttgttcccctgtttctggttacgctgattctgttgggggtggtcagcaacaacaattcgattaccatctcggcaaccatattgctgctgatgcagcagacggcattgatacagtttgtcccgttggtcgagaagcacgggttgaatctcggtatcattcttttgaccataggggttttgagtccgttggtttcaggaaaggcgcaggttcctcccgttgccgaatttttgaattttaaaatgatatccgccgtttttatcggtattttcgtggcttggctggcgggacgcggcgtgccttatgatgggacagcagcctgttttaattacagggctgttaatcgggacggttatcggggtggcatttatgggcggtatccctgtcgggccgctgattgcggccggcatcttgtcttttgtcgtcggaaagggttaaaatctccttttcatttcggctcgccatagttcaacggatagaacgtatgcctcctaagcgtaaaatacaggttcgattcctgttggcgaggtttgacgatttcatttgtctgtttcccgtgttgcgggaagtttccgatataaggcctttcagtgttggagggcttttttgccatctgaaaactttttcttcctgcttgaaaaaccgacctttaggacggtagaatcatgaaatgattttcaggcttcgtaaaagatgttccggcttggaaatctgttgttttatgatatagtggattaaatttaaatcaggacaaggcgacgaagccgcagacagtacagatagtacggcaaggcgaggcaacgccgtactggtttaaatttaatccactataaaagctgtacaggtataacaatgaataaatttggggataaggtcgtatgagcgtaggtttgctgaggattctggttcaaaaccaggtggttactgttgagcaggccgagcattactacaatgagtcgcaggcgggtaaggaagtgttgccgatgctgttttcagacggtgtcatttcgcccaagtcgcttgcggcattgattgcgagggtgttcagttattcgattcttgatttgcgtcattatccgcgccacagggtgctgatgggggtgttgacggaggagcagatggtggagttccactgtgtgccggttttccgtcggggcgacaaagtattttttgcggtttccgatccgacacagatgccgcaaattcagaaaaccgtttctgccgcagggattgaggttgagttggtcattgtcgaggatgaccagttggcgggtttgctcgattgggtgggttcgcgttcgacatcgctgcttcaggagcttggggaggggcaggaggaagaggaaagccacaccctgtatatcgacaacgaggaggcagaagacggccctgttccgaggtttatccataagactttgtcggatgccttgcgcagcggggcatcggacatccatttcgagttttacgaacacaatgcccgtatccgtttccgtgtggacgggcagctccgcgaggtggttcagccgcccattgcggtaagggggcagcttgcttcacggattaaggtaatgtcgcgtttggacatttccgaaaaacggataccgcaggacggcaggatgcagctgacctttcaaaagggcggcaagcctgtcgatttccgtgtcagcacattgccgacgctgtttggcgaaaaggtcgtgatgcggattttgaattccgatgccgcgtctttgaacatcgaccagctcggttttgagccgtttcagaaaaaattgttgttggaagcgattcaccgtccctacgggatggtgctggtaaccggtccgacgggttcgggtaagacggtgtcgctctatacctgtttgaatattttgaatacggagtcggtaaatattgcaacggcggaagaccctgccgagattaacctgccgggcatcaatcaggttaacgtcaatgataagcagggcctgacttttgccgctgctttgaagtctttcctgcgtcaggacccggacatcattatggtcggtgagattcgtgatttggaaactgccgatattgcgattaaggcggcacaaacagggcatatggtgttttccaccctgcacaccaataatgcgccggcgacgttgtcgcgtatgctgaatatgggtgtcgcgccgtttaatattgccagttcggtcagcctgattatggcgcagcgtcttttacgcaggctgtgttcgagctgcaaacaggaagtggaacgcccgtctgcctctgctttgaaggaagtcggcttcaccgatgaggaccttgcaaaagattggaaactttaccgcgccgtcggttgcgaccgttgccgggggcagggttataaggggcgtgcgggcgtgtatgaggttatgcccatcagcgaagaaatgcagcgtgtgattatgaacaacggtacggaagtggatattttggacgttgcctataaggagggtatggtggatttgcgccgggccggtattttgaaagttatgcagggcattacttcattggaagaggtaacggcaaataccaacgattaggtttgagaatgaaaatgccgtctgaagcgtgtttgtttcagacggcatttgactttcagggtgtttgccgggaaggcggggcggtcagcggtatgccatgtcgggttcggatatttccggcaaactttccgtttggccggaaaccgtatatttcccgtctgcccatccgcccaagtcgatcagtttgcagcgttgcgaacagaaggggcggaatgcgttttcgggtttccatactactgctgtttgacaggtcggacatttgacttgaaggcgtgtttgccgcgattcagtcattgtgttttccttgtgttggttttgaggcgaaaatccctgaataaaacgcgtgcaggcgcattgttttctcacgcaggcttttgaggctgccgtcattgagcagcacatcgtctgcaagcagcaggcgttcggattcggatgcctgatggctgatgacggccgccacctcgccgcgcgtcagcccgctgcgggccatcaccctgccgatacgtttttccacaggggcacttatggtcaggacacgccgtatcaggctgataaattgacgcttttccgtcagcagcggaatttcgacaatgccgtaagctgcatcagtaaaggtttcttgctgttttttgatttctgagaaaatcagcggcaacatcacggattcgagcaaggcttttcgcgatggggaggcaaagacttctttacgcaatatgtcgcgccgcaacaaaccctgtgtgtcaaaaacggtgtcgccgaacagccgcctgatttccggcagggcgatgccgtctgaagccgtcagcgagtgcgccgccgcgtctgcatcgatgcgcggcacgcccaaatcggcaaaacattgcgcggctgccgatttgccgctgccgattccgccggtcagtccgacccataccgtcatcttacagcaccggatgggtcagccaccagttgaccgcccgccatacggaatcgtttgccgtaaaaattatccagcccgaaactgtcagtgcggggccgaaggcaaaatgctgccccttggcgacgcgcataacgattgccgcgaccaaaccgatcagcgaggaaacaaaaatcagtacgggcaatgcggatatgccgagccacgcgcccaatgcggcaatcagtttgaaatctccgttgcccataccggtttttcctgtgagcagtttatacactgcacataagagccataatgaaccatagccggcgaccgcacctaaaacggcagactgcaaaggcacgaagccgccgtccaaattaaatatcagacccagccaaattaagggcagtgtcatcgagtcgggcaggtattgggtgtccgcatcgataaaggtcagggaaatcagaaacgcggtcagtaccaatccgcccagcgtaatccaagaccagccgtattgccaggcgaccagcccgaacaatacgccggtcagcagctcgattaagggataacgtatgctgattttggtttggcaggaagcgcatttgccgcgcaggagcaggtagctgacaatcgggatgttctgccacgcgcgtatcggcacgcggcatttgggacagcaggaatccggtttcatcaggttgaaggtacggctttcctcttcggtcagcggcaggtttaaatattctttggcaaataccgtccagccgcgttccatcatgaccggcacgcggtaaatgacgacatttaagaaacttccgaccagcagcccgaacaccgctgccaaaggcacggcaaacggcgacaatacagacaaatcagacatattttgttctcaatgtattcaaaacaaaaacaaaccggcgcagagcgaatccgcgccggatctgtgcggcaaatcaggcgaccacgttgcccaaattaaacagcggcagatacatggcgaccagaagcgtgccgatgaccaagcctaaaatcacgataatgatcggctccatcatagcggacagcctgccgaccgcattgtccacctcgtcttcgtaaaattcggcggctttgttgagcatatcgtccaaagaacccgattcctcgccgatggaagacatctgcaacatcatattggggaacagttccgtcgcacgcatccccgaagtcatagacaaaccttggatgacgcgcgtacggatttcccgggtggcttcttcatagattaaattgcccgccgcgccggcagtggagtccaatacatcgaccaaaggcacgcctgccgcaatcagcgtcgccgtcgtcctgccccagcgggcaatcgttcctttgcggacaatgtctccgaaaatcggcatacgcagcagtatggcatccatacgccgttggattttaatcgaacgcgccttcaatttaaggaagccgtatatggcaaagcccagtgcgatcagcaccatccagccgtatgagacgaaaaagtcggacatatccatcactgtttgggtcagtgcgggaagctccgcgcccatattggcgtaaacttctttaaaggcgggcagtacgaaaatcatcatcacgaataccaaaccgatggcgacggcgatgacggataccggataggtcagtgcggtttttacctttttgcggatggcctgggttttttctttgtaaattgccaatttgtccagcaggctttccaatacgccgcccgtttcgcccgccgcaaccagattgcagtagaagcggtcgaaatattttgggtggtttgagaatgcgcggctcaacgagctgccctgttccacttcgcctcggatttccatcagcatttccgtcatagacgggttgccgtgtccgcgcgccacgatttcaaatgcctgcatcagcggcaggcccgctttaatcatcgtggacagctggcgggtgaaaacggtgatgtcttcttgtgtgattttgcgcttggagcttgttttcacacgggtaatctgcaacgggcggatgccgcgttttgccagttttttgcgcgcctcttcttcggtaaacgcggatacttcgccgttgaccagtttgtcggaggcggaatgcctgccttcaaagataaagcgtttttctttctttgcgaacaaagaaaatcctccgtttttagccatattctagccccgtaaagtaattggaataaaatgtaagaaacatcgttaaaaaacagtaccggcgtgttcccggtaagatgaaaaccgccgacatcccgcctgcgggcggcaaacgggacagaatcggatgcgattataccttatttaggcggctgtccggcatttatgcgtacacaataaatcttgcaggatattgttgcgggtcaaatgccggccggagggcatttccgccatatggaaataaggtgctattggacgcggcgggcggtgttccggagattcgccaaagccgctgccgtttgttaaactacattctgctacattttaatccggttctgaaaaatcaaggaaaacagatgaatgcttttacccgtgcatggtatgcgctcgaacgccattatcaggatacgcgtcatgtccttttgcgcgaccgctttgcctgcgaaccggaccggtttgagcgtatgcacgagcgtttggacgggatgttgttcgattacagcaaaaaccgtttgggcgaagatacgctgcaactgctctgcaatcttgccgacgcggcggatttggaagggaaaatgcgtgctttgcggacgggtgcgaaagtcaacggcagcgaggggcgtgccgcgctgcatacggctttgcgcctgcccgacggtgcggatgccgtttatgtggacggcagggacgtgttgcccgaaatccgccgcgagttaaatcgtgcgttgaagtttgcacacagtttggacgacggttcgtatcaggggataaccggaaaacggattacggattttgtccacatcggcataggcggatccgacctcgggccggcaatgtgcgtgcaggcacttgagccgttcagacggcatatcaccgtccattttgccgccaacgccgatcctgcctgcctggatgcggttttatgccgtctgaaccccgaaacgacagtgttttgcgttgccagcaagtccttcaaaacaccggaaaccctgctcaatgcacaggcagtcaaggcgtggtatcgcggtgcagggttctcggaatccgaaacggcgtgccatttttgcgcggtgtctgccgacactgcggcagctgcggcttttggtatcgcggcggaacgcgtgtttgcgatgtacgactgggtgggcggacgctattccgtctggtcgcccgtcggtttgcccgtgatggttgcggtcggcggggcgcgtttccgcgagttgttggcgggggcgcacgcgatggacaggcattttttcagtacgccgacgcgtcataatatccccgttttaatggcactgattgccgtgtggtacaacaatttccagcacgcggacgggcagaccgccgttccgtacagccacaacctgcgcctgctgccggcgtggctgaaccagctcgatatggagagtttgggcaaaagccgcgcttcagacggcagtcccgccgtgtgcaaaacgggcggcatcgtgttcggtggtgaaggggtcaactgccagcacgcctatttccaactgctccaccaaggcacgcgcctgattccctgcgattttatcgtcccgatgacggcgcagggcagagaggacggacgcagccgttttaccgttgccaacgcctttgcccaagcggaagccttgatgaagggcaaaaccttggacgaagcacgcgccgaactggcagatttgcccgaagcggaacgcgaacgcctcgcgccgcacaaagagttccccggcaaccgccccagcaacagcattttgattgaccgcctcacgccctacaatttgggtatgctgatggcggcttacgaacacaaaaccttcgtccaaggcgcgatatggaacgtcaaccccttcgatcagtggggggtggaatacggcaaacagttggcaaaaaccatcatcggcgaactggaaggcggcacgtccgtacacgatgcctcgaccgaagggctgatggcgttttaccgcgaatgccgtctgaaaggcggcggcgcggcataaaagtactgccgcctttctgtattgattcgggcgcggaaaaggcaatacctgccgcctgcccgattccgaaacgccaatgtttggcaaccgctcgcgtattgctgacgaatatgcgtttgcgtggcacaatagcgcattcatttcaaatgaacatactgcttgaaaataccggcaagcgtcccacgaaacatctcacataaggaaatattatgtctttgcaaaacattatcgaaaccgcctttgaaaaccgcgcggacatcaccccgaccaccgttactcccgaagtcaaagaagccgtgttggaaaccatccgccaactcgattccggcaaactgcgcgttgccgaacgtttgggcgtgggtgagtggaaagtcaacgaatgggcgaaaaaagccgtgttgctgtccttccgcatccaagacaacgaagtcctcaacgacggcgtgaacaaatacttcgacaaagtgccgaccaagtttgccgactggtctgaagacgagttcaaaaacgcaggcttccgcgcagttccgggtgcggttgcccgacgcggcagctttgtggcgaaaaatgtcgtgctgatgccatcttatgtcaacatcggcgcatacgtcgacgaaggcgcgatggtcgatacttgggcaaccgtcggctcttgcgcgcaaatcggtaaaaacgtgcacttgagcgggggcgtcggcatcggtggtgtactcgaacccctgcaggccgcacccaccatcattgaagacaactgcttcatcggtgcgcgttctgaaatcgttgagggcgtgattgtcgaagaaggcagcgtgatttctatgggcgtgttcatcggtcaatccaccaaaatctttgaccgtacaaccggcgaaatctatcaaggccgcgtaccggcaggttcggttgtcgtatccggcagtatgccttccaaagacggcagccacagcctttactgcgccgtcatcgtcaaacgcgtggacgcgcaaacccgtgcgaaaaccagcgtcaacgaattgttgcgcggcatctgatgccttaaaccgtatttgaaacgtccaatgccgtctgaaatccgcttcagacggcattgccgtttgcacgctgcaacgtgaaaacacagaaacagggacaatttgctataatcaacggtttagaacgaaccgaacactatttgaaggatacaaaatgggttttctgcaaggcaaaaaaattctgattaccggcatgatttccgagcgttccatcgcttacggcatcgccaaagcctgccgcgaacaaggcgcggaactggcgtttacctacgttgtggacaaactggaagagcgcgtccgcaaaatggcggcggaattggattccgaacttgtattccgctgcgatgtcgccagcgacgacgaaatcaaccaagtgttcgccgacttgggcaaacattgggacggcttggacggtttggtgcattccatcggttttgcgccgaaagaagccttgagcggcgacttcctcgacagcatcagccgcgaagcgttcaacaccgcacacgaaatttccgcatacagcctgcccgcgttggcaaaagccgcccgtccgatgatgcgcggcagaaattccgccatcgtcgccctgagctacttgggcgcggtgcgcgcgattccgaattacaacgtgatgggtatggcaaaagccagccttgaggcaggcatccgctttaccgctgcctgtctgggtaaagagggcatccgctgcaacggtatttccgccggcccgattaaaacgcttgccgcctccggcatcgccgatttcggcaaactcttgggacacgtcgccgcccacaacccgctccgccgcaacgttaccattgaagaagtcggcaataccgccgccttcctgctgtccgacctgtcgtccggcattaccggcgaaatcacttacgttgacggcggttacagcattaatgccttgagcaccgagggataatccgccgttttcaaatccgtgcgccgtccgtgccgcatatcggtttcgggcggcgttttgccgtctgaagcgtatttctagggaaatgcccgacttacggcaggcgggatgggaaatgcggacgcttgttttaaccgattgcctttgtgccgacttgctgcaggtgcagcggaaacggttcggatgcgaaaatgccgtctgaaacgccaaacgggtttcagacggcattttttatttaaagcatcagcacacttcaaccagccagccgtatttgtcttccgccaaaccatactggatgtcggtaatcgccttacggatggcatagccgcgttcttggcttttcacttcgatttctttgccgccgatgacgaaggaagtaacgggcgagatgacggctgccgtaccggtcaaaatggcttccgcaccgttttccaccgcagctttgagttcgtcaaccgtgaaattgcgttcgctgacggtatagcccaaatctttggcaaccgtcagtacggaatcgcgggttacgccgtgcaaaaactcgtcggtcagcggtttggtaatgatttcatcgccgttaatcaggataaagttggacgcgccggtttcctgcacgtcgccgttcgggcagaacaggacttgatttgcgccatattcggctttcgccttcagcacccagtgcatggcggaagcgtagttgccgccgcatttgacgcggcccatatgcggggcgcagcggatgtgttcggtttccaccaaaattttgacgggcgatccgactttgaaatagtcgccgacgggggaagccaaaatatacagcagggcggtttcggaaggagaaccggccttgccgataacgggatcggtaccgattaaggtcggacgcaggtacagggcggcaggcgcatcgggaatttcatcggcggcacgtttgaccaatttgattagcgcgtcaagataagcttcggtttcggggcgcggcaggtgcaaaatgtccgcactttgccgcatacgcgcgatattggcagtcggacggaacagcacgattttgccgtctgcctgacggaaggctttcagtccctcgaaacattcgctgccgtagtgcagggcgtgcgcgcccggtgcgagggagaggtcttgggaagattgccattcggtcggctgccatttgccttcgcggtaggcgaggacgggcatttgactgtgaaaaacgctgccgaatacggcgggtacgggtctgctcatgatgtaaagcctttcttattctgatatgtttcaatgaacggtttgaatttgaagattgtaaagatacgcctgcaaacagggttttgacaagtgcgcggcgggtttttctgtcgatgcggtgtccaatccgttatttttcaaatggaaaggaacggtgtatttggtaaaattgtcggcaatcgcatactccgtatgtcgtccgaacacgctgccgcatcctatccgaaaccgtgcaaatcgtttaaactagcgcaatcttggttcagagtgcgaagctgtctgggcggcgtttttatttacggagcaaacatgaaacttatctataccgtcatcaaaatcattatcctgctgctcttcctgctgcttgccgtcattaatacggatgccgttaccttttcctacctgccggggcaaaaattcgatttgccgctgattgtcgtattgttcggcgcatttgtagtcggtattatttttggaatgtttgccttgttcggacggttgttgtcgttacgtggcgagaacggcaggttgcgtgccgaagtaaagaaaaatgcgcgtttgacggggaaggagctgaccgcaccaccggcgcaaaatgcgcccgaatctaccaaacagccttaagaaagccgatatggacaacgaattgtggattatcctgctgccgattatccttttgcccgtcttcttcgcgatgggctggtttgccgcccgcgtggatatgaaaaccgtattgaagcaggcaaaaagcatcccttcgggattttataaaagcttggacgctttggtcgaccgcaacagcgggcgcgcggcaagggagttggcggaagtcgtcgacggccggccgcaatcgtatgatttgaacctcaccctcggcaaactttaccgccagcgtggcgaaaacgacaaagccatcaacatacaccggacaatgctcgattctcccgatacggtcggcgaaaagcgcgcgcgcgtcctgtttgaattggcgcaaaactaccaaagtgcggggttggtcgatcgtgccgaacagatttttttggggctgcaagacggtaaaatggcgcgtgaagccagacagcacctgctcaatatctaccaacaggacagggattgggaaaaagcggttgaaaccgcccggctgctcagccatgacgatcagacctatcagtttgaaatcgcccagttttattgcgaacttgcccaagccgcgctgttcaagtccaatttcgatgtcgcgcgtttcaatgtcggcaaggcactcgaagccaacaaaaaatgcacccgcgccaacatgattttgggcgacatcgaacaccgacaaggcaatttccctgccgccgtcgaagcctatgccgccatcgagcagcaaaaccatgcatacttgagcatggtcggcgagaagctttacgaagcctatgccgcgcagggaaaacctgaagaaggcttgaaccgtctgacaggatatatgcagacgtttcccgaacttgacctgatcaatgtcgtgtacgagaaatccctgctgcttaagtgcgagaaagaagccgcgcaaaccgccgtcgagcttgtccgccgcaagcccgaccttaacggcgtgtaccgcctgctcggtttgaaactcagcgatatgaatccggcttggaaagccgatgccgacatgatgcgttcggttatcggacggcagctacagcgcagcgtgatgtaccgttgccgcaactgccacttcaaatcccaagtctttttctggcactgccccgcctgcaacaaatggcagacgtttaccccgaataaaatcgaagtttaaccaccaccgaaaggaacacaaaaaatgcgcttactccatactatgctccgcgtgggcaatctcgaaaatccctcgatttctaccaaaacgttttgggtatgaaactgctccgccgaaaagattatcccgaaggcagatttacccttgccttcgtcggttacggcgatgaaaccgacagcacggttttggaactgacgcacaactgggatacggaacgatacgacttgggcaacgcctacggacacatcgcggttgaagtggacgatgcctacgaagcctgcgaacgtgtgaagcggcagggcggaaacgtcgtccgcgaagccggcccgatgaaacacggcacaaccgtgatagccttcgtcgaagaccccgacggatacaaaatcgagttcattcaaaagaaaagcggcgacgattcggttgcctatcaaactgcctgataccgccgccgccaatgccgtctgaagcctttaggggtttcagacggcattttgttgccgtcgacctgctgtttgagcctgtgccggttcaaactttatccgttacaccgataaggcaaaaaagatgccgtctgaaacggcatccttgatctgcgaaagggcagttgggaatcaaatacccaattcctgcgccaatgcttgggcacgtttgagtacgtcgccttccgcttcttccagcaatttctgcactgtctcggcagcggcatcgcggtcgccgatttcgagatacatttcggcaaggtcgtatttcgcttcggaaggcgcgtcagaacctacagattccgaagggaaactggtatctgcattatttgggatattttcttccgagaggtagatgctccaatctaccgtttcctcctcgccgtctttcaggaagtcgggcaaagcgtctgcctcagaggtgttggaatcaggcgtttccaaagtgatttccgctgcattttcctcaacggccggtgcttcagcaggttgcaacagtgcggacaaatcatcggcaacggtttccgctgcattttcctcaacggcaggtgcttcagaaggttgaagtaatgcggacaaatcgtctgcggtggcgttgaaatcgggtgtttcggcaacggtttccgttacattttcctcaacggccggtgcttcagcaggttgcaacagtgcggacaaatcatcggcaacggtttccgctgcattttcctcaacggcaggtactttagaaggttgaagtaatgcggacaaatcgtctgcggtggcgttgaagtcgggtgtttcggcaacggtttccgttatattttcctcaacggacggtgcttcggcaggttgaagcaatgcggacaaatcgtctgcggcggcgttgaaatcgggcgtttcaggcgcagtttccgcgacggcatcggtttcgtacactttcaggaaatcgtgcaactcttccggtgtttggacttcggcaactgttttttccaagatggtttcgggcgaggaagccttcaggaagcctgccagtccggagggtgaggcaggttttgcggaagctgtttcttctgtgccgatatggttgtttgagggcaggttgtcggagaaatcggtatcgacggtttccggtttgttttcggcagtttgggcgacagattccggttcgggcgtgtcgatgacgatttcgacagggttgtacgggttgaaggtctcgggctcgtacacgctgtctgtggattcgatggcgttccaatcggcatccgcgcgtttttgggtttcttcatcctgcgtaagtgcgccggataaaatgccgttttgcgcggctgccaggctgtcgaaatccaagtcgatgcggttggaaggcgtatcggtttcgacatcgaacgtttgttttgccgataactcttcttcagattccccatctaaggcaagtgtgtcgtttacatcgtttttcggagcgggttcgggcgttgccggagtttcgacttcggcaaaggtgatttctatgccgtcgtctgccgcgtcgtcaaggtcaggctcttcctcagggacggattcttcggtacggcgcgcgcgtttggattgggcaaggcgcaaaagcagcagcagggcgattaatgccgcgcctccgccggcaagcagcaaggtgtacgaaccgccgaacagaccgtcaaacagtccgctttcggtttcttcttcggcagaaacctgttcgacaggttcggaaacggcgttaccggtttcgtcggtcggcgtgtcgatggcagaagcggcggcttcttggggggcggattcggcagcggtttccgatgcggcagtatttgcagcgggtacaggttcgggtcgaacggccggtttttccgcttttgcttcgggcgcggcaacttttgcttcaggtttttcaaccggtttctctaccgttgcctgtttggacggttcggacggcatggatgcggtttcggctttgggtttcgccgtttgcggtttgggttgttccgctttgatcctgttcagattcggaatgtgaagcacgctgcccgcacgcagtctgccgtgtgcggaaacatttgggtttgccttcagcagcgcatcggcaacctgttcgagcgtcaggtgtttcgggcggatggcggcggcaatctgtttgaccgtttcgcctttgcggacggtatgggttttgccgttgtatgccggtttgacggctgcgttcgcgctgtcttttttatcggttttgcggagggctttggcgttttgattttcttgggactctgctgtcggagcggttttgcggtgtgtcttgccgtctgaaagtgcagatttggttttgggcgagtagccgacaggatcgaggatggcggtgtattcgcgtacctgtgcgcctgcgccgatgcggaacaccaggacgggatcgcggactgcctgttcggaagaaacggcaatgacggctttgtcgcccaacttgtggactttggcggtcaggcctttttcggaaacggtaacgctgccgccgcctagcagggctttggcttcttcgccggttacggtaatgctgccggaaaagggttcgtcaaggttggactggatattcagtccgcccagtccagcatgtgcctgaaaggatgcggcaactgcgacggaggcggcaatcagtttgatttgtctgttgtttttcaagatgtatcccctgtgggttggcggctgaatacggtttgaccgcgtacagtctgtaaatttcgtcatcatcgggcatcggcggggcagtcggccggcgggcatttaatatgtgaatgtaccgaccgccgccacattttaaacggcaatcattcgccgtttttacaaattatgacatatctccatcttttttcaaaaacatctgtgcatatttgcatcaatcaaaacaaaatttgttggttttgcaggtgcaaaaacagggttctgcctgtatgattagcgtttatttgatttgctttctcatttggatatgaaattcgtcagcgaccttttgtccgtcatcctgtttttcgccacctataccgttaccaaaaacatgattgccgcaacggcggtcgcattggttgccggtgtggttcaggcggcttttctgtattggaaatataaaaagctggatacgatgcagtgggtcggattggtgctgattgtggtattcggcggcgcaaccattgttttgggcgacagccgcttcattatgtggaagccgagcgttttgttttggctgggcgcgctgttcctgtggggcagccacctcgccggtaaaaacggcttgaaggcgagtatcggcagggagattcagcttccggatgccgtatgggcgaaattgacgtatatgtgggtcggtttcctgatttttatgggtatcgccaactggtttgtgtttacccggttcgagtcgcaatgggtcaactataaaatgttcggctcgactgcactgatgcttgttttctttattattcagggtatttatctgagtacctgtctgaaaaaggaggattgactgtggaatattttatgttgctggcaacagacggggaggatgtgcacgaggcgcgtatggcggcacgtcccgaacacctcaaacggctggagacgctgaagtcggaaggccggctgttgacggcaggcccgaatcctttgccggaggactccaaccgcgtttcgggcagtttgattgtggcgcagttcgagtctttggatgcggcgcaggcttgggcggaagacgatccctatgttcatgcaggcgtgtacagcgaagtgctgatcaagccgtttaaagcggtgttcaaataatgccggccgtcgatttgatccgcgaacgcctgcagacgctcgatccgctggtgttggaaatcggcgatgagagccatctgcacaaaggacacgcgggcaataccggcggcggacattatgccgttttggtcgttagcggccgttttgaaggcgtaagccgcctgaaccgccagaaaacggtcaaatcgctgctcaaagatttgttttcaggcggcatgattcacgcgctcggcatccgggcggctacccctgacgagtatttccatacggcggactgaatgaagtctgcccgaacatttcaatttaaaatttaaagagagaagattatgaaagcaaaaatcctgacttccgttgcactgcttgcctgttccggcagcctgtttgcccaaacgctggcaaccgtcaacggtcagaaaatcgacagttccgtcatcgatgcgcaggttgccgcattccgtgcggaaaacagccgtgccgaagacacgccgcaactgcgccaatccctgctggaaaacgaagtggtcaataccgtggtcgcacaggaagtgaaacgcctgaaactcgaccggtcggcagagtttaaaaatgcgcttgccaaattgcgtgccgaagcgaaaaagtcgggcgacgacaagaaaccgtccttcaaaaccgtttggcaggcggtaaaatatggcttgaacggcgaggcatacgcattgcatatcgccaaaacccaaccggtttccgagcaggaagtaaaagccgcatatgacaatatcagcggtttttacaaaggtacgcaggaagtccagttgggcgaaatcctgaccgacaaggaagaaaatgcaaaaaaagcggttgccgacttgaaggcgaaaaaaggtttcgatgccgtcttgaaacaatattccctcaacgaccgtaccaaacagaccggtgcgccggtcggatatgtgccgctgaaagatttggaacagggtgttccgccgctttatcaggcaattaaggacttgaaaaaaggcgaatttacggcaacgccgctgaaaaacggcgatttctacggcgtttattatgtcaacgacagccgcgaggtaaaagtgccttcttttgatgaaatgaaaggacagattgcgggcaaccttcaggcggaacggattgaccgtgccgtcggtgcactgttgggcaaggcaaacatcaaacctgcaaaataattctgaaaacgggatatggcggcaagacgttcagacaggcgttttgccgccgcgcaggacagggaataccatgaaacagaaaaaaaccgctgccgcagttattgctgcaatgttggcaggttttgcggcagccaaagcacccgaaatcgacccggctttggtggatacgctggtggcgcagatcatgcagcaggcagaccggcatgcggagcagtcccaaaaaccggacgggcaggcaatccgaaacgatgccgtccgccggctacaaactttggaagttttgaaaaacagggcattgaaggaaggtttggataaggataaggatgtccaaaaccgctttaaaatcgccgaagcgtctttttatgccgaggagtacgtccgttttctggaacgttcggaaacggtttccgaagacgagctgcacaagttttacgaacagcaaatccgcatgatcaaattgcagcaggtcagcttcgcaaccgaagaggaggcgcgtcaggcgcagcagctcctgctcaaagggctgtcttttgaagggctgatgaagcgttatccgaacgacgagcaggcttttgacggtttcattatggcgcagcagcttcccgagccgctggcttcgcagtttgccgcgatgaatcggggcgacgttacccgcgatccggtcaaattgggcgaacgctattatctgttcaaactcagcgaggtcgggaaaaaccccgacgcgcagcctttcgagttggtcagaaaccagttggagcagggtttgagacaggaaaaagcccgcttgaaaatcgatgcccttttggaagaaaacggtgtcaaaccgtaatggcatttccaataccgatgccgtctgaagcctttcagacggcattgcacgttcaggtaaggaggacggcttatgcgtgcggtcatacagaaaacggtaggtgcaaaggtggatgtcgtgtccgaagccggcacggaaacctgtggcaaaatcgacggcgggtttgtcgtgttactcggcgtaacgcatagcgacacagaaaaagatgcacgctatatcgccgacaaaatcgcccatttgcgcgtgtttgaagacgaagcgggcaagctgaacctgtctttgaaagatgtcggcggcgcggtgctgctggtgtcgcagtttacgctttatgccgacgcggcaagcgggcggcggccttcgttttcccaagccgcacctgcagaacaggcgcagcagctttacctgcgaacggcggaactgttgcgcggacacgggattcatgtcgaaacagggcgtttccgcacgcatatgcaggtgtcgctctgcaacgatgggccggtaaccatactgctggactctttcatgacgcggatttccccaaaaatgaaggttgttccggattgaaattgaatccgcaatgataaaatatcgacaatgaacgacaatacacacacccttcccccgcgccacctgtccgtcgcccccatgctcgactggacggacaggcactaccgttaccttgcccgccagattacccgaaatacttggctgtacagcgaaatggtcaatgccggtgcgattgtttacggcgacaaagaccgctttttgatgttcaacgaaggcgagcagcccgtcgccctgcaactgggcggcagcgatccgtccgatttggcgaaagccgccaaagccgccgaggcatacggttacaacgaggtcaacctcaactgcggctgccccagtccgcgcgtgcagaaaggctcgttcggcgcgtgtctgatgaacgaagtcgggctggttgccgactgcctcaacgccatgcaggatgcggtcaagattcccgttaccgtcaaacaccgcatcggtgtggacaggcagaccgaataccaaaccgttgccgatttcgtcggcacgctgcgcgacaaaaccgcctgcaaaacctttatcgtccacgcccgcaacgcttggctggacggtctttcccccaaagaaaaccgcgacgttcccccgttgaaatacgattacgtttaccgcctcaagcaggagtttcccgggctggaaatcatcatcaacggcggcatcaccaccaacgaagcaatcgcaggacacctgcaacacgttgacggcgtgatggtcgggcgcgaggcgtaccacaacccgatggtgatgcgcgaatgggacaggctgttttacggcgatacccgcagcccgattgaatacgccgatttggtgcagcgtctctacacatacagccaagcccaaatccaagccggacgcggcacaatcttgcgtcacatcgtccgccacagccttgggctgatgcacggtctgaaaggcgcgcggacttggcggcgtatgctttccgacgcaacgctcttgaaagacaacgacggcagcctgattctcgaagcgtggaaagaggtcgaacgggcaaatatgcgcgaatagggcggggctgtatgtgtgaaatgccgtctgaaggcttcagacggcatttgtgcgtttgtcgggcggtgtttagggggcggtaacggcgtgtttcggcactttgtccatatcccagtgtgccaccgcccagtcgagcagttcggcagggcggtcggtttccggtgcttcgggcagcttgaggtaacggaacacttggcggaggagttgttcgcggcggtttaaatccaatgcgggggcgagcgtctgtttcgaccatttctgcccttgtgcgttggtcagcagcggcaggtgggcatattgcggtgtcggaacgtccaaacactgctgcaaatagatttggcgcggcgtggaaacgagcaggtcttgtccgcggacgatgtgggtaacgccctgttcggcatcgtcggcaacgacggcgagctggtatgcccagtaaccgtctgcacgaagcaggacgaaatcgccgatgtcgcgggcgaggttttgggcgtaaccgccgacgatgccgtctgaaaaaccgataatgcggtcggggacgcggatgcgccacgccggctgtttgccttgcagtgcagggcgttggccggggtggcggcaacgtccgttatagacgaacccgtctgcgccccgccttgccccggcctgccagtctttgcggctgcaatggcagggatagaccagtccggcggttttcaggcggcatagggtttcttcatacagggcgtaacggcggctctgataggcgacttctccgtcccactcgaatccgaatgcctcaagcgtgtgcaggatatggcttgccgcccccggcatttcgcgcggcggatcgaggtcttccatgcggatcagccatttgccgccgtgcgcgcgcgcatcggcataggaagcgacggcggtcagcagcgagccgatgtggagcagcccggtcgggctgggggcaaaacgtcctgtgtacatatctggtacagcccctttatttaagactattaatcaaagccattatctcatctttattcagttccatcccgggctcttcaagcaaggttaaatcatatagggcattatattgctcttcggtagctgaaccatccataagagcaggcgagaaaaaatcaaaggctctatctgcaattctctcattacttgcatttctactaaccagtttcgtcaattctgtatattttgaaaagtttatggaaaaataaaacagcgaaaaagttttggtttcgctgtttttgatttaattagcactgataatcttcaaattcccacgaaaaaaaacgaagtaaataagtcaatgacttttcccaagtttcttttgaacattctttaagaattttctcaatttccgatttaataacagaatgattaaattcattcataatcatcatacccgccccccatttaaccctttgattttggaaacaattatgcaaaatccatttaggagagcatatgcgaacagaaaatatatctgcagcatcactatcatcagttcctatgtctaaatcaattcccacacaaaaattgtctttgatttcgggaacgaaatcttcaaaggcacaatcgtaaagattgatggctttcaattctaggttaatcattttatattcaatagtatggggaggtaccggatccttaaaaatcagatctgaataaatttcattgggtgaaatgatttcgattgcttttgccatgattctatttccttttgtgttagtgggtaatgtcgtgcattaacttcttgcccattaatatttttagggtgaatccttgatatgccgcactgtgtccggtcaaacgggcgatgccgtctgaaagcctttcagacggcatcgggaaaatgcctaagccaaaggcgcgagcagtttttcaaacgcttcttcaaactgtttcaaaccgtcttcctgcaaacgcgttgccaaggtttcgacatcgatgccgagcgcggcggtttcggcgagctgcgcttgtgcttcttctacgccttcggtcagcgtggctttggctgtgccgtggtcgataaaggctttgagcgtggcatcgggaacggtgttgacggtgtgcgcgccgatcaggctgtcaacgtagagcgtgtcgggataggccgggtttttcacgccggtagatgcccataaaagctgcacgcggtttgcgcctttggtttccagcgcggcaaattcggggctgccgaagtattgcgcccagtcttggtaggcggctttggcaagggcgatggcgattttgcctttgaggtggtcgggcagtgttgtgtccagcgcgccgtccacacgggagatgaagaagctggcgacaacttggatatgggcaacgctttgtccggctgctaagcgtttggcgatgccgcgcgcgtaggcggcgtaggctttgagggtttgggcgcgtgagaacagcagggtcaggttcacgctgatgccgtctgaaacgagggtttcgagcgcatcgatgcctgcgtcggtggcaggcactttaatcatcgcgtttttgcacccgatggcggcgtagaggcggcgcgcttcttcaaccgtgccttgcgcgtctttggacaattcgggcgaaacttcgaggctgacgaagccggttttgccgccggtggattcgtgttcggcaaggcaaacgtcgcaggcggcacgcacatcggcaaccgccattgtttcgtagcgttgtttggggctgaggttttgctgcttgagggcggcgatttcatcggcgtaaagcgcgtcgccggcgaaggctttttggaagatggcgggattggaagttacgccgcacacgccctgtttcaacatttgcgccaattcgccgctttgcactagcgagcgggaaaggttgtccagccagatttgttgtcctaatgctttaacgtccgataaaatggtcatctctgattcctttggatggataggcggggtttgagggcttatgctaccccgattcggaaattttgggtagttttattacagcaaaggcggatggcaatggcagaaaacggaaaatatctcgactgggcacgcgaagtgttgcacgccgaagcggaaggcttgcgcgaaattgcagcggaattggacaaaaacttcgtccttgcggcagacgcgttgttgcactgcaagggcagggtcgttatcacgggcatgggcaagtcgggacatatcgggcgcaaaatggcggcaactatggcctcgaccggcacgcctgcgtttttcgtccaccctgcggaagcggcacacggcgatttgggtatgattgtggacaacgacgtggtcgtcgcgatttccaattccggcgaaagcgacgaaatcgccgccatcatccccgcactcaaacgcaaagacatcacgcttgtctgcatcaccgcccgccccgattcaaccatggcgcgccatgccgacatccacatcacggcgtcggtttccaaagaagcctgcccgctggggcttgccccgaccaccagcaccaccgccgtcatggctttgggcgatgcgttggcggtcgtcctgctgcgcgcacgcgcgttcacgcccgacgatttcgccttgagccatcctgccggcagcctcggcaaacgcctacttttgcgcgttgccgacattatgcacaaaggcggcggcctgcctgccgtccgactcggcacgcccttgaaagaagccatcgtcagcatgagtgaaaaagggctgggcatgttggcggtaacggacgggcaaggccgtctgaaaggcgtattcaccgacggcgatttgcgccgcctgtttcaagaatgcgacaattttaccggtctttcgatagacgaagtcatgcatacgcatcctaaaaccatctccgccgaacgtctcgccaccgaagccctgaaagtcatgcaggcaaaccatgtgaacgggcttctggttaccgatgcagatggcgtgctgatcggcgcgctgaatatgcacgacctgctggcggcacggattgtatagtggattaacaaaaaccagtacggcgttgcctcgccttagctcaaagagaacgattctctaaggtgctgaagcaccaagtgaatcggttccgtactatctgtactgtctgcggcttcgtcgccttgtcctgatttttgttaatccactatataaggcgttgcagccgtttcagacggcatttgtggtaagatatgccgtctgaaaacaaggaaatcccatgcaggcaatttctcccgaattacaggcgcgcgccgccaaaatcaaactgttgatcctggatgtggacggcgttttgaccgacgggcgcatctttatccgcgataacggcgaagaaatcaaatcgtttcacacactggacggacacggtctgaaaatgcttcaggcaagcggcgtgcagactgcgattatcacgggccgggacgcgccctccgtcggcatccgcgtcaaacagttgggcataaattactatttcaaaggtatcagcgacaaacgtgccgcctatgaagaattgcgcgcgcaggcgggcgtggaagaagccgagtgcgcctttgtcggcgacgacgtggtcgatttgccggtaatggtgcgctgcggattgccggttgccgtccccggcgcgcattggtttacgcggcaacacgccgcctatatcacggaacacgcgggcggcgcaggcgcggtgcgcgaagtgtgcgacctgattatgcaggcgcaagggactttgggcgcggctttgaacgagtacatcaaatgaaagtaagatggcggtacggaattgcgttcccattgatattggcggttgccttgggcagcctgtcggcatggttgggtcgtatcagcgaagtcgagattgaagaagtcaggctcaatcccgacgaaccgcaatacacaatggacggcttggacggcaggcggtttgacgaacagggatacttgaaagaacatttgagcgcgaagggcgcgaaacagtttccggaaagcagcgacatccattttgattcgccgcatctcgtgttcttccaagaaggcaggttgttgtacgaagtcggcagcgacgaagccgtttaccataccgaaaacaaacaggttctttttaaaaacaacgttgtgctgaccaaaaccgccgacggcaaacggcaggcgggtaaagttgaagccgaaaagctgcacgtcgataccgaatctcaatatgcccaaaccgatacgcctgtcagtttccaatatggtgcatcgcacggtcaggcgggcggcatgacttacgaccacaaaacaggcatgttgaacttctcatctaaagtgaaagccacgatttatgatacaaaagatatgtaagctatttgttttaatagcatttttttcggcgtcccccgcttttgcccttcaaagcgacagcaggcagcctattcagattgaggccgaccaaggttcgctcgatcaagccaaccaaagcaccacattcagcggaaacgtcgtcatcagacagggtacgctcaatatttccgccgcccgcgtcaatgttacacgcggcggcaaaggcggcgaatccgtgagggcggaaggttcgccagtccgcttcagccagacattggacggcggcaaaggcacggtgcgcggacaggcaaacaacgttgcttattcatctgcaggcagcaccgtagtcttaaccggtaatgccaaagtacagcgcggcggcgatgtcgccgaaggtgcggtgattacatacaacaccaaaaccgaagtctataccatcagcggcagcacaaaatccggcgcaaaatccgcttccaaatccggcagggtcagcgtcgttatccagccttcgagtacgcaaaaatccgaataatcccaaaatgccgtctgaaatataaacccggttcggacggcatatgccgaccgaagatattgaagagatatttatgagtgcaaacgtcagccgccttgttgttcaaaacctgcaaaaaagtttcaaaaaacgccaagtcgttaaaagcttctccctcgaaatcgaaagcggcgaagtcatcggactgctcgggcccaacggtgcgggtaaaaccaccagcttctacatgattgtcggactcatcgccgccgacgcaggcagcgtaaccctagacggacaagaattgcgccacctgcccatacacgaacgcgcccgcctcggtgtcggctacctgccgcaggaagcctcgatattccgcaaaatgaccgtcgaacaaaacatccgcgccatcttggaaatcagaaccaaagataaaaatcaaatcgacagggaaatcgaaaaactgctcgccgacctcaatatcggacacttacgccgcagccccgcgccgtcgctgtccggcggcgaacggcggcgcgtcgaaatcgcccgcgtactcgccatgaaaccgcattttattttgttggacgaaccttttgccggcgtcgatccgattgccgtcatcgacatccagaaaatcatcggtttcctcaaatcgcgcggtatcggcgtactgattaccgaccacaacgtacgcgaaaccctcagcatctgcgatcgggcctacattatttcagacggcacggtgttggcatcgggaaaacctgatgatttggtcggaaacgaacaggttcgttctgtttatctgggtaagaacttcaaatattgaaaatatttttcagacgggcgacctaatatcgtcgggcaggcggcaaaaatacggatttatgttgtttttacataaattaattcaaatttaaaacattgacttaaacctgttttcaaagaatattgcccgatatgcttgcatgtcgtcccgtaatttggtttaatacgcatctcttaacgagacagacaaaggccagatagctcagttggtagagcaacggattgaaaatccgtgtgtcggcggttcgattccgcctctggccaccaaaaaaccgccttgaagcggttattttttttgcctgccgtttttgggaagttgtccgtgtcggacacgttttgtgtctgaccgttatgtagaagggcaaaaatgataatgaccgccccgttgcgttttggagaagagggtaaaggcagaaagcatatgccgtctgaatgatatttcagacggcattttatattgcggcggcactcagtccgtgtcgctttcaggcaactctgccgaacccatgcgtttgagcacgatattggttttgttgcggagccgtttgcttttcggatggtcggcgtagtagagcggggcggggacgcgcgccgtcagttttgccgcctgctgtttggtcagcttggcggcgggtatttgataaaaataccgggacgcggcttccgcgccgaaaacgccgtagtgccattcgattgagtttaaatacagttcaaaaatcctgtctttgtcggtaacggcttccatcatcgcggtaatcgccgcttcttcgcctttgcggatatagctgcggctttcgtttaaaaacaggtttttggcaagctgctggctgatggtcgagccgcccgccttcactttgccgctgttccggttgcgcctgatggcgttttgaatgccgccccaatcgaagccgccgtgcccggcgaaacgggcatcttcggaagcaatcagggcttttttcaggttggtggaaatgcgtttgtagggcatccagcggtaatccagtgcgacatcgcgaccttcctgttcaaactgcttcatccgcatcgacataaaggcagtccgatggggcgcgacggcgcggtaggtaatgatgttgccgtacacataggcattgaaaaagataaagatgccgacgggcagggcaatcagccatttgatgatgcggaacatgtttatagggctttcatgtattcgataacggggcggatatcgggcgtaaatccgcgccagagggcgtaggaagccgccgcttgaccgactagcatacccagtccgtcggcagtttttttcgcacccgattgtcgtgcaaaatctaaaaacggttttgccgcgcagccgtacaccatatcgtaggcaagcgcgcagttttgaaaaatatcgggcggaatatcgggaatctgaccgtttagaccgcccgacgtgccgttgatgatgatatcaaaaccgccgttcacgtccgccatcgggacggcttcaatgccgaaaagctgcgccaattcctcggctttggcgcgggtacggttggcaatgacgatacgggcaggacggtgttctttcaaaacaggaatcacgccgcgcaccgcgccgcctgcgcccaaaagcaaaatggttttgccctcgatggcaatatttttgacctgcgtgatgtcgttggtcaaaccgataccgtcggtgttgtcgccacgcagcttgccgtttttcaacggaatcagcgtattgaccgcacctgccgccaatgcgcgttcggaatgctcgtccgccagatgaaacgcttcctgtttgaacggtacggtaacgtttgccccgcaaccgcctgtttcaaaaaatgtcgaaaccgcctgcgcgaaaccgccgatgtcggcgcaaatgcgttcgtattcaatgtcaacgccttcctgaagggcaaattgttgatgaatttgcggcgatttgctgtgggcgacggggttgccgaaaacggcgtagcgggggagggcggtcatggtcgtgttccaaaagacgggaaggctattttataacggcggcgtacagatggaaacgatgccgtctgaaaccgccttcagacggcatcgtttcctgtatcggtcgggaaaaatccggatgcggtgcgccggcttgtccgcattgttgacaatcttgccgtctgaaactatattttccggcttgaaatttgacgcaaaaccggtttcagacggcatcggcgtggtaaaatcgtgccgactttgcgtcaagccgccgcgttccgcatattttgctatttcccttttccaggagctgaaaaatgtctattaaaaacgccgtaaaattgattgaagaaagcgaagcccgctttgtcgatttgcgctttaccgataccaaaggcaagcagcaccactttaccgtgcctgcgcgcatcgtgttggaagaccccgaagagtggttcgaaaacggtcaggcgtttgacggttcgtctatcggcggctggaaaggcattcaggcttccgatatgcagttgcgccccgatgcgtctacagccttcgtcgatcctttttatgatgatgcgactgttgtgttgacttgcgacgttatcgatcccgccgacggtcagggttacgaccgcgacccgcgctccatcgcccgccgagccgaagcctatttgaaatcttccggcatcggcgagaccgcctatttcggtcccgaacccgagtttttcgtattcgacggcatagaatttgaaaccgatatgcacaaaacccgttacgaaatcacgtccgaaagcggcgcgtgggcaagcggtctgcatatggacggtcaaaacaccggccaccgcccgaccgtcaaaggcggttacgcacctgttgcaccgattgactgcggtcaggatttgcgttcggcgatggtaaacattttggaagaactcggtattgaagtggaagtgcaccacagcgaagtcggcaccggcagccaaatggaaatcggcacgcgctttgctactttggtcaaacgcgccgaccaaacccaagacatgaaatatgtgattcaaaacgttgcccacaacttcggcaaaaccgccactttcatgcccaaacccattatgggcgacaacggcagcggtatgcacgttcaccaatccatttggaaagacggtcaaaacctgttcgcaggcgacggctatgccggcttgagcgacaccgcgctctactacatcggcggcatcatcaaacacgccaaagccttgaacgcgattaccaatccgtccaccaactcctacaaacgcctcgtgccgcactttgaagcgccgaccaaactggcatactccgccaaaaaccgttccgcttccatccgcattccgtccgtgaacagcagcaaggcgcgccgcatcgaagcgcgtttccccgatccgaccgccaacccgtatttggcatttgccgccctgttgatggcgggtttggacggcattcaaaacaaaatccatccgggcgaccctgccgataaaaacctgtacgatctgccgccggaagaagatgcattggtgccgaccgtttgcgcttctttggaagaagcactggccgccctcaaagccgaccacgaattcctcctgcgcggcggcgtgttcagcaaagactggatcgacagctacatcgctttcaaagaagaagacgtacgccgcatccgcatggcgccgcacccgctggaatttgaaatgtattacagcctgtaagcacgtctggttttcagaaaagcaatgccgtctgaacacagtttcagacggcattttgcatttgaacggcaaaccggcggcgcggggcggcatttttcagcaggcgggcgatatttgctacaataggcttttgttttttttgggctgcacgaacgatgactgcatcgaaatcaggttttatcgggcaaatcttttcccgcaatatgcttgtctgtatttttacggggtttacctcggggctgccgctgtactttctgattaacctgattccggcgtggttgcgcagcgagcaggtggatttgaagagcatcgggctgatggcgttaatcggtctgccgtttacttggaaatttttgtggtcgccgctgatggacgcggtcaggctgcccgttttgggacggcggcgcgggtggatgctgctgacgcaggcagggttgctggcggctttggcggtctatgcctttttaaacccccgtaatcatctgccgctgattgccggcttgtcggtgcttgtcgcttttttttccgccagtcaggatattgtattggatgcgttcaggcgcgagattttgtcagacgaagaattgggtttgggcaactcggttcatgtgaacgcctaccggattgccgccctgattcccggttcattgagtttggtgttggcagacaggatgccgtggttagaagtatttgttatcacttcattatttatgctgcccggccttctgatgacgctgtttcttgcgcgcgaacccgtgttgcctcctgccgttcctaaaacgttgaagcagaccgtggtagagccgtttaaagaattttttacgcgcaagggcatcgcttcggcggtgtgcgtgctgctgtttatcttcctttacaaactcggcgacagtatggcaaccgcgttggcaacgccgttttatctggatatgggtttcagcaagaccgacatcggtttgattgcgaaaaatgcaggactgtggccggcagtggcggcaggtatcttgggcggtgtgtggatgctgaaaatcggcgtaaacaaagccttgtggctattcggcgcggtgcaggctgtaaccgttttggggtttgtatggctggcagggttcggacctttcgacacggtcggcacaggcgagaggctgatgctggcggcagttatcggcgcggaagcggtcggcgtggggttggggacggcggcgttcgtatcgtatatggcgcgtgaaaccaatcccgcatttaccgcaacgcagcttgcgctgtttaccagcctgtccgccgtcccgcgcacggtcatcaattcctttgccggttatctgattgaatggctcggttatgtaccgtttttccaactgtgtttcgcactcgccctaccgggtatgctgctgctgctgaaagttgcgccttggaacggggagaaaactcaggatgcaggcagatgaacgcgtcaaactggagcgtttacctgatattgtgtgaaaacagcgcgttctattgcggcatcagcccgaatccgcaacagcggcttgccgcccacacaaccggtaaaggcgcgaaatatacccgcgtattcaaaccggtggcgatgcgtatcgttgcaggcgggatggataaaggaacggcactcaggcaggaaatcgccgtcaaaaaactgaccgccgcacaaaaacggcaattgtgggagcaggcagaaaaaatgccgtctgaaacctgacggttcaggttcggacggcagttggcagcaatcagggaaaagcggggcaggcggtaaggaaaaccgacgtttcaacacacaggacggtacataaagcgtcgccctatgaaagtgaaggcatatatcagtattttttatacgccaacagaaaagaatacgatgaactgtttgttggatttgtattgattaatcagtatattttttatgccggggtatttttccttatcggtatcccttcttttatgaggatgcctgccgctcatataaagaacgggaaaatacgatgggaaaatacggtacagccctcgacatcgcacaatatgtcaacttatagtggattaacaaaaatcaggacaaggcgacgaagccgcagacagtacagatagtacggcaaggcgagacaacgccgtactggtttttgttaatccactatatttgtttgttttatattgtaagtatacgtataggctttgtaaaggtaaattgtgaaaaaagcagttttttaaacgaatgaaacggcttcgggctgaaatatatgctgatgccctgtccttcccgtatatcttgtgtgttgtcaaagtgcaggctgctttgaaatcggtattgccatctatgaaccaccactttgttttatttcagcgggcttgagatgtgtataagaatattgttttgaataaatttaaaaaaatgataatcgttattgaagatttttaaaggaaagcgtagagtgccaattctatgaagcaatacggtaagtaacaatgaaaatatctactgcttgggtatagagcatatttcacaacccgtaactattcttgcggaaacagagaaaaaagtttctcttctatcttggataaatatatttaccctcagtttagttaagtattggaatttatacctaagtagcaaaagttagtaaattatttttaactaaagagttagtatctaccatgaatatattctttaactaatttctaagcttgaaattatgagaccatatgctactaccatttatcaactttttattttgtttattgggagtgtttttactatgacctcatgtgaacctgttaatgaacaaaccagtttcaacaatcccgagccaatgacaggatttgaacatacggttacatttgattttcagggcaccaaaatggttatcccctatggctatcttgcacggtatacgcaaaacaatgccacaaaatggctttccgacacgccagggcaggatgcttactccattaatttgatagagattagcgtctattacaaaaaaaccgaccaaggctgggtgctcgaaccatacaaccagcagaacaaagcacactttattcaatttctacgcgatggtttggatagcgtggacgatattgttatccgaaaagatgcgtgtagtttaagcacgactatgggagaaagattgcttacttacggggttaaaaaaatgccatctgcctatcctgaatatgaagcttatgaagataaaagacatattcctgaaaatccatattttcatgaattttactatattaaaaaaggagaaaatccggcgattattactcatcggaataatcgaataaaccaaactgaagaagatagttatagcactagcgtaggttcctgtattaacggtttcacggtacggtattacccgtttattcgggaaaagcagcagctcacacagcaggagttggtaggttatcaccaacaagtagagcaattggtacagagttttgtaaacaattcaagtaaaaaataatttaaaggatcttattatgaatgagggtgaagttgttttaacaccagaacaaatccaaaccttgcgtggttatgcttcccgtggcgatacctatggcggttggcgttatttggctaatttgggtgaccgttatgcggatgatgctgctgcaattgtcggtaaggatgcaaacttaaatggtttgaatttatggatgaaaaaaggggtggaaaacctatgggatgatacggtcggtaaaaagacccgtttaatgtgtatttccgttttttggattgtggttttcaatttgtagcgaatcggattcggcatatacggcattgcaaaaagcgtttgactctccaatgccgtctgaaaaccggtttcagacggcatttgcgttcagtgagaaaggtcgcgcctgccgcccgaacgtctcgccgcagcctctgcataacggcgcacctctttttccaaattttccaagttcaaaggaaaatcaggcagtctgtctccctgtttctcttcgcggacaatccgcccgccatccaaataccacgtctgttgcgcatgataggtctgcatatccgccgttacgccatccgctttcaatgctaccgtcgaagattgtgcaataaaaagatttccgtttttcaaataatattcgaaactctggcgtttttttccattgtcgaaactccaatagactttttgcggcagaccgtccgcatcatagccgaccacaagactgttcgccttcatccctcggggcatcaattcccgcatattctgataaaacacagaattgcgcgagtccgacgcaattcggttgctctctttgcggaagtcccaaaccttctgctcgtcattcgcgacatcccggtatttcgccaaatatacctgggccatctgataacacccgaggcaatgctcataaacatcttccccgattttcccgcgccccgccgcatcaaataccgaaccgtctggttgccaaacaacccgatattctcctgtcgtttcataattttccccgtgaaccgttccgccgtacacatttacagaaaacggacgatcgttccgatacagatattcggcattaacaaatgcttccggcgagcgttgcgaaagcgaaaccgcaaccaaaccgccctcgccgatatggtaatccagccaaacctctttcccatgttcctgctccgttacgtgaaaccatttcgccttttctttcaaacgactgagccggatagcgagcgcgagataatccttctccgactgcaacggaccgtcatccacagttccggcaagattttcctccgtccttatcgattccttcacgatgacaaccgccctgtcggcatttcggaacaggcgggcaagtttcgccacaaaagcattcggatttttaggtacttcagttgccgtatcgctcaaaaaccaacgcggattaatctcataggcaatacccgttcccagccaaaaggcaaatacaagtgcaaaaaatgacaacagtaccggtttgaattttttaaacatatttatttttcgtttaacagaatatatcgattatatcagacgagctttgattgccgggttttgctattttttgttgtaataatcaaattgcacgttgactatgtctttctcggtaaaaatataacggagcattgttttaagcctttcataacgttcattaattcctacgctatcaggtagccaaggggaagctttaatttcaaaaagtttccaatttggaaccattaagaaatcaataatggtaccgattccaatgacaacatatcttggtatgtccatcggataaggatatttttttctaacctcgattaaatcattctccaacttccaatattcttcatcatcccacaccccgtcatcataccatttgccaataaatgaattttcgtcatacccctcaaaacaagtaatatttcttctgaagttttttaactcacacataatacacataataattaatctccaatacgatttaggtttttatcaaatgtaccgtttcttgtttcttttctgtaatgttattcatcgtagtaaggttctgttgaataattgtctttgcccccggcaatgatagtaacaattttcccttttgcttcccaagcttgtactcctatttcatcaaactcatagacatatgtcggataagattcatttgataaataatatttatcaacaccgtatgatttagggtaatggaaaagctgtttaaaatcttcaaaattcagacctattatattaacgcccataaaatatagctcctgataacaaaatatcgaaataattttgtttttttttttgacggaaatgagtaaatttgagtcgggagattcataatattctgttctaaactcatcaggaggttcatacataaaagtttccagtatgtttttgtactgtgttatatccgcaccaaaacggaatattcctacagaagtaaaaggtaaaaattcgggagttttaacgaccgcgtcgaccatgctcttctccttttgtttttcgattggcatttttggcaatatttctgattttttgcttaatctttaagcgttcatttttggacattccgggaataattttatttgttaattcagcaatttttgattccgctgatatttgacttcgaccgccatctccatgtttttcattcttggagcttcctgttcttttaggcggacaagaattatgaacccaaaccccttccgtttccgcctgattacccttgacgaagtaagtatgccaatcggcaacggtcagattgtaggctttgagcggttttggtttgacaacggttttgcggacggtttgggttctgccgctttcggataacagcctgcttcccgctttcaaatcttccgctttaatccatttgccgtccgaataaaacggatggatgcggttggaaatcaggatttggctgttgccgatgccgtctgaaagccggatatcgcttcagacggcattttgattgccgggttttgctattttttgttgtaataatcaaatcgcacgttgactatgtctttctcggtaaaaatataacggagcatcgttgtgaatctttcataacgttcatgaattcccacactatcaggcaaccaaggggaagctttaatttcaaaaagtttccaatttggaaccattaagaaatcaataatggtaccgattccaatgacaacatatcttggtatgtccatcggataaggatatttttttctaacctcgattaaatcattctccaacttccaatattcttcatcatcccacaccccgtcatcataccatttgccaataaatgaattttcgtcatacccctcaaaataaggaacgtttcttataatatccttgaactcacacataataatgtatctccaatataattaaacttttcgtctcaatctacctttactatgttgtattggaaagtaaaaaaatttccagtcctctacatctagatcagtaaaaatataacggagcattaccctgaacctttcataacgctcattaattttgacacttttaggcaaccaagtagaagctttaatttcaaaaagtttccaattttgaaccattaaaaaatcaataatggtaccgattccaatcacgatgtcccttggtatatccatcggataaggatatttttttctaacctcaattaaatcattctccaatttccaatattcttcatcatcccacaccccgtcatcataccatttgccaataaatgaattttcgtcatactccttaaaacaagggatgtttcttctaaaatccttgaactcgcacataataattaatctccaatacgatttaggtttttatcaaatgtaccgtttcttgtttcttttctgttcagtttttcgggtgaagatgcctctttccaagcacctccattatgtgaatctacatcgcgtgatatataactctttccttttttaaaaatagcagcatcatttctcgttctttcttttatttttctatatcccaattcctttgctgctgcatatgcttctgaatcattcccatatatgggggtagatggtgtttttcttggcggacaatcattatgaacccaaaccccttccgtttccgcccgattgcccttgacgaagtaagtatgccagtcggcaacggtcagattgtaggctttgagcggctgctgtttgagggtaatgttttgaaccgtctgttttgcaccgctttcggaaagcagggtgtcgccttttttcagacgacctgcctgtatccattttccttgactgtaaaacgggtggattttattggaaatcagggtttggttgttgccgatgccgtctgaaatttcaatgtaaacggtttcttgatacggattgccgtatcgggcggtaacgggtttgtatcccgtttttccgcttgcctcgtccttggcgaagacgcggtcgccggttcggatacgggcaatggctttgtagccgtctgccgttttgaccaaggtgctgccgtggaaggagcaggtgtaggatttttaaagaacttagttctcaatatcctgtttcattcatcaaaatgccgtctgaaagctgaataccgcttcagacggcattttggtggttgggtttttaagccaacctacgcttactgaaaaccaaattgagtttcagacagtttttaggtttgggtgtccaatctaacttatatttgtccatttaattagtcgtttgtatcaaatttccattatttattttccaatttactttataattatcttcataataatctaattcaaaaaaacctgatatttcaatatccaattccattattgttttaatacatttttcaaaataaataatgaaataagattttacgcatgcaccaaaaaaaatatagctgctccaattaaaactatttgtcgggaaaacccacccgcttttatatatttttgcagattctttctcttcgatattaaagggacaattattccaaaaattattaatgttttcttggatgatttttatatcatcgtcagagcattcaatccatccttttatggaaacatatgatgccatgtttaatctcctaaacctgttttaacaatgccgccttttgattcaatatatgacttaacttgtgaatgaacaccgtatttaaaccaaaattctgcacgttttccctgttggtttgctgcttcgatggttgctttaatttgctttctatttttttgatttaagaaatttttaggtttatctattgctgaaattgttcttttggcttgtattaaagcatcattcgtaacagcgtcaatttctctgccgttaataaattttgatgaaccatcagtttttcttctaattaaatcttcataatgtatatctagagcttctctatactttgcattttgatataactgtctcgcactatcagacaaagccaatttctttttataagaatcagcaaaatccccgctaaccgcagccttccctggttttgccgcctttgccaacttcgcgactttggctgctgcggcaacgttgaagacggcttcgacggtttcggcggcattgggattttcctgtatccaccggtcaacggcttcgcgcgtattcttttcaaagcccgccacgctgcccaagccgccgatgacggcgaatttgccctcggcgggcaagggggcgatgttgcgcattgcggctttgtctatggcatagcgcgttccgtacagtatgtcgcctatgcccaaggcttcgcccgcgctgataaaggggttgagcgcgccggcggcgacgccgttgataaactccatgctgttgccccagcggtcgagcttggcattgtgctcgaacatttttctgttggcttcatcggcgcggtcggagaaattgctgccgaggttgctgtaattgtcggatatgcgttgccggatgctgcgggtgtcggtcggattgagtttgatactgcgggctgtgccgttgacgtgataggtgtattcgtctcgtgcgcccgtaggtttggggtaattgccgcccttcgggccgtcgtaggcatcggcgggatgatgttcgtgtccttcccagttgagccggtatacggtaaagccttcgtcaacgttgcctttttcttcgctcgcgctgtcggcggcgtggttgtcgaagggggcgtgttcttcgtgtccgtgtccggaaaagcgggtgtggtagccgattgtgccgttgatgtttgcctgttggatgagcaggttgcccatctggtgggtatagtcttggatgacgttgattttgccggtgcggtcggaaacgctgccgcgcgggtcgccgaagaggtggtatttgccgccgggttcgtagtgctgccgttgggcgttatcggtaatgaacgggtcttgcgccaagtccgccgcgagggcgggctgtatgagtgcggccgccgctacggcgcaggcggcaaggaggtttgtcagtctgcgcagcggtttcacggtttatcctcctttgcggcggcggatgacttcgttgccgacatcgggttttttaccgttgttttgtttgaagtcgggacggttttgggcggttgtgtcgccgtagggggtaatgtcggagaaatcgaccatcaggcggtctgaggctttgacggttttgctgactttgtaagggccggtccaaagggcgtattgttcttggtattgggattcgtaggcggcggttttaggggtaatcagcagtttccggctgtcgcggtcaacggcgaaatattcgagcttggtttgggctttaagggtttcggcgttgtagaggtgcagttcggtacggctgcggacggtgccgaatacgtcgacggttacgaatacgtcggtgtcggcgtattcgggcggtacgacttcgatgccgcgcaggtagaagacggtttggatgaggttggtcaggaaggaaacgtcgcgggggttggcgagcagggtttcgttgcggtagtcgcccgtgccgttgacggacagtccggcggagcgttcgcctttgcgtccgctgtttttcgtcagggcggcggcgggggcgttcaaaagcgatgtggaagtggttacgctggagagcgcgtcggatttggtggtggcggtagtgtcgtaggcggggtagctgtattgggtggcactttcggggttgttgtggtagccgccgcgtatcagtgcgtcgatagagtagcgtccgccgcttatgttgcccgaaccttggtcgcccataacggagacgtaaagggcggctttgcgtccttttagggcggacaaatccatttctttgacggcggcgcgggacgatgcggcgacgagttcttgttcgacggcaaagcgtttgccgccgccgtgggcgggtatgccggtcagtgtgccgcaggctgtgaggacgagggggatgaggaggagcagggttttcatagcggggtttgtttgatgttgaacggattttgagtgtaaagggattttaagggtttgtaaacaaaaggggcgaaaatgccgtctgagcggcggaaatggctttcagacggcatttgcgctcaataataatatcccgcgcccagaatacacggtttggatgcgccggttgctttgtgcggactaccgggaatgcgattaatccaacacgccgccaaccacgcaaatgcggcggcttccacccattgcggatcgaggttcaggtcggcggtgctgtgcagggaaacgcgtgtgccgaaacattctgccaaatccgccattaaaacaggattgcggatgccgccgccgcaaatgtacatttgacgggcatctgccgctgcgtgtgagacggcgtcgcaaacggtttgcgcggtaaaacgggaaagcgtccgcaatacgtcgtatcggttttcgccgccgtcaaggtaggtttcgagccaatttagggcaaacagttcgcgccccgtgcttttagggtggggttgtgcgaaatacgggtgggcgagcagcctgtcgagcagttgcggcaatatgttgccttgtgccgcctttgcaccgtttttgtcgtaaggaagctgccagtgtgcctgcgtccacgcgtccatcagcatattgcccggccctgtgtcgaagccgaaggcgggtgcgtcgggggggagtacgctgatgttggcaatcccgccgatgttcagtaccgcgcgtgtttccctgttgtcgcggaacagggcttcgtgaaaggcggggacgagtggcgcgccttgtccgccggccgcaaggtcgcggctgcggaagtcgccgacggtaaaaatccgcgtccgttccgccagcagcggcaaatcggcaagctgtatgctgtaaccgtgttccggcgcgtgtcggacggtttgcccgtggcagccgagggcggtaatgtcggacggtgcgaggttttgactgcacagcagttcggcggcggtttgcgcatataggcggctgagttcttgcgacaaaatcctgctgcggtgcagttcgtctgcgcctgtgtcctgcaaatccagcaattggcggcgtaacctgccggggtagggggtaaaggcgtgcccttccgcgcccagccatttgccgccgtccatccgtatcagtacggcatccgccccgtccatgctggttcccgacatgatgccgatgtaaagctgtgtttccatcatcactcccaaactggtgcaaaacgccattttaacgtgtattgacgctcgtataccgatttgccgccgcagtgtaaataaagtgtaaataaatgtttcaagacggatggaaaaatattataatgcgcccgcaacatccagtagtagaagtgtcatacaaaccgtttccggcagcagttttgcattcggtcaggtttgggggtattcggatgcggttaggaaggatgcgtctgccatatcccgaaacggcagttcgaccggaggcagcagtacagtgtcggcaacactcatgatttccaccacattaaaggaagattgccatggctcaaatccaaatgagcgcaaatgttaaaaccatcaacgccgtctttgccgccatgctggtaggtacagtcggctattttatttattggggcttgggttatacccattacaattacgccgccttattcattattgccacgatgttcggcgtgtttatggcgttcaacatcggcggcaacgatgttgccaattctttcggcaccagcgtcggtgcgggtacgctgaccatcccgcaggctttgctgattgcggcggtatttgaggtcagcggcgcggtcatcgcgggcggcgaggtaaccaataccatacgcaaaggcatcgtcgatttgaagggtgttgatttcgaacccatacagtttgtgtttattatgatgtccgcgcttttggcggcggcgttgtggctgttgtttgcctcgaaaaaagggcttccggtatctaccacccattccattatcggcggcattgtcggcagcgcggtatgtatggcggtaatgaacgatgccgcatcgggcgatttgatacgttggggcaagctgggcggtattggtgtttcttgggtattgtcgcccgtgttgggcggcgcggtgtcctattttctgttttcgcgcgtcaagaaaaacgtcttagattacaacgcttgggcggaaggcacgctcaagggcatcaagcaggaaaaaaaggcctataaagaacggcaccgcctgtttttcgagggtttgtccgaagccgaaaaagtcgagtacgccaccaaaatggcgcacgacgcgcaaatttacgacgaacccgaattcgatccgcaagagctgcaatcggagtattaccgcggtctttatgcgttcgacaaccgtaaaaacaatgtcgattcctacaaggcactgcattcttggattccctttatcgcttcgttcggcgcgatgatgatttccgctatgctgattttcaagggcttgaaaaacctgcatttggggatgagcaacgtcaacagcttcctgaccatctttatgataggcgcggcggtgtggatggggacgtttgtttttgccaaaagcctcaagcgtaaagacttgggcaaatcgacctttcagatgttttcatggatgcaggtctttaccgcctgcggcttcgcattcagccacggtgcgaacgatatcgccaacgccatcggtccgtttgccgcgattatggatgttttgcgtaccaacagcgttgccgcgcaaaatgtcgtccccccgattgcgatgctgactttcggcatcgcgctgattgtcggtttgtggtttgtcggtaaagaggtgattaaaaccgtcggtacgagtttggcggaaatgcatcctgcttcgggttttaccgccgaactgtccgccgcctccgtcgtgatgggcgcgtcgctgatggggctgcccgtgtccagtacgcatatcttggtcggcgcggtactcggtatcggtctggtcaaccgcaatgccaactggaaactgatgaagcccatcggtttggcgtgggtcattaccctgcctgccgccgccgtattgtcggttgtctgctacttggttttacaggcagtattctgattgtaaaatactgatgccgtctgaacccgtgttcagacggcattttgttgatggaatgtgcgggcttgtgccttatgcacaatctgttctgtcgggatatgccgtttggtatagtgattaacaaaaatcaggacaaggcgacgaagccgcagacagtacagctagtacggcaaggcgaggcaacgctgtactggtttttgttaatccactatatcttggtttcggaacggtcggacacaaaggtgcggaacgttatgatatgccgccgcctgttcttgaaaacacttatcctgccggcagcaaaatgccgtctgaaaaagcctttcagacggcatttgtacgttagccacaatcacactgtttgcgaatatttcgccttggtttctttatggcgcaggtggtaatcgaagaccatggcgatgttgcggatgaggaagcgtcctttcggggtaacggtcagcccgtggctgttcaggcgcaccaatcccaaaccggcgagtttttccaaatccgccagttcgtctttgaagtagcggtcgaacgggatgccgaacatactttcgtaaatccgatagtcgagcgcgaaacggcacatcaaatcctgaatgatgttgcggcgcaggatgtcgtcctgattgagctggtagccgcgcatgatgggcagtctgccttcgtcgatggcggcatagtaggcatcgatgtcgcgttcgttttgggaataggtgctgccgattttgccgatggacgacacgccgatggcgaccaaatcgcaatccgcgtaggtcgaatagccttggaagttgcgctggaggaagccttctttgagggcgatggagagttcgtcgtcaggtttggcgaaatgatccatgccgatgaagacgtagccgcgttcggttagggtttggacgcagtattgcagcatatcgagcttctcttcgctgtcgggaacggcggcggtatcgatgcggcgttgcggtttgaacacgtgcggcaggtgggcgtagtgataaagggcgaggcggtcgggatcgagcgacaaaacggtatcgatggtggttttgatgctttccgaagtctggtgcggcaggccgtaaatcaaatcgacgctgacggatttgaaccccgcttcgcgcgccgcatcgatgacttctttggtttcttcgtaactttggatgcggttgaccgccgcctgcactttggggtcgaaatcctgaatgccgatgctcatgcggttgaagccgagtctgccgagcatgaggacggtgtcgcggctgactttgcgcgggtcgatttcgatggagtattcgccggtggggattaactcgaaatgtttgcgtatcatgcggaagacacgttcgatctgttcgtcgctcaaaaaggtcggcgtgccgccgccgaagtgcagttgggcaagctggtgccgtccgttcagatgtggagcgagcagttccatttctttttcaagatattcgatgtaggcatcggcgcggcttttgtctttggtgatgattttgttgcagccgcagtagtagcagatggtgttgcagaacggaatgtgaatgtaaagggaaagcggtttgtttaacgcgcccataccgcgcaaatgtaaagctttgatatattcgccttcgcggaaaccgtcatggaaacggtcggcggtagggtaggaagtgtagcgcgggccgctggcgggcaggctggcaatcagcgcgcggtcaaactcggggcggtcatcgtttacattgtgattgttctgtatctgaatgattttcatggtgtgtgtgtgcggttttatgatgttagtcaaattttggatagtttggtagaatgccacagtatgataaacctgtcttgatatgtgtcaataagcacatatagtggattaaatttaaataaggacaaggcgaggcaacgccgtactggtttaaatttaatccactataatcatgatggggcaaagcgcacaaaaaggtacggtatggcttcgcataatactacacatcagatgaaaacgctgtgttcttcctgttctttgcgggaactctgcctgcctgtcgggctgctgcccaacgagctcagccaactcgatgccgtcatccgtcaaagccgccgcctgaaaaagggcgaatacctgttctgtgtcggcgaagcctttacctcgctctttgccatccgttcgggcttcttcaaaacaaccgtcgccagtcaggacggccgcgatcaggtaacgggtttctttatgtcgggcgaactcatcggcatggacggcatctgttcccatgtgcacagttgcgacgcggtcgccttggaagacagcgaagtgtgcgaactgccgtttacccacatcgaagaactggggcaaaacatccccagcctgcgtacgcacttcttccgcatgatgagccgtgaaatcgtgcgcgaccaaggtgttatgctgctgttgggcaatatgcgcgccgaagagcggattgccgccttcctgctgaacctttcccaacgcctttattcccgaggttttgctgccaacgacttcatcttaagaatgtcccgcgaagaaatcggcagttatctcgggctgaaacttgaaaccgtcagccgcacattatctaaatttcatcaggaaggattgatttccgtcgagcataagcacatcaaaatcctcaatctgcaggtgttgaaaaaaatggtgtccggctgctcgcacgccatttgattaacccgtacgaacatttcagacagcattctcaataaacacagggcagacgaaaacatctgtcctgtttgttgtatctgccgcaaagtgccgtctgaaaaccggcagccgcctaaatcgaaaaatcctcgctgatgggcgtgtacagaatcctatccaccttctcgcgtgtcaggtgcggcgcgaacgcttggataaagtcgtaggcatatccgcgcaaataagtatcgctgcgcaaagcaatccacgtcggcgacggctcgaacaggtgtgccgcatccacaagctgcaaatcgccgtccgtatccgggttgtacgccattttcgccatcagtcccacgcccaaacccaagcgcacataagtcttcaatacgtccgtatctgccgcagccaatgcgacatcgggttgttccaaacgggctttggaaaatgcccgcgcgatgctgctgcccgcattgaatgcaaattcataagtaatcagcggaaacctcgccaaatcttcaatacggagggggtttctgcattcgagcaaggggtggtcgttcggtacgataaccgcatgagtccagtcatagcagggaagttttcccagttcgggatggtcgtctatccgttccgtaacaatcgccaagtccgcctcgcctgaggtaaccatacgtgcgatggcggcagggctcccctgtttgatggtcaggttgactttcggatagcgtttcacaaaatcggcaacaatcaagggtagggcatagcgtgcctgagtatgcgtcgtggcaaccgtcagcgaaccgctgtcctgtccggtaaactcgctgccgatatttttaatgttctgaacatcgcgcaaaatacgttccgcaatatccaaaaccaccttgcccggctgcgagaccgaaaccacgcgcttgccgctgcggataaaaatctgaatgccgatttcttcttccagcaatttgatttgtttggagatgccgggttgcgaagtaaacaaggcttcggccgcttcggaaacgttcaggttgtgctggtaaacttctaaggcgtatttcaattgttgtaatttcatggcgggtcggtgtgggtctgtgtcgggtggctgaacattgtttataatttatcatattttcttgccggtacggtatggggctttgccgttgtgtttgttgtttttgtgcaacggcaatcgtgcgatatggaaaaaatccccctaaagtaatgacacggaattgatttttcggcatgatagactatcaggaaacaggctgttttacggttgttttcaggcgttgagtattgacagtccgccccctgcttctttatagtggagactgaaatatccgatttgccgccatgtttctacagcggcctgtatgttggcaattcagcagttgcttctgtatctgctgtacaaatttaatgagggaataaaatgaccaaacagctgaaattaagcgcattattcgttgcattgctcgcttccggcactgctgttgcgggcgaggcgtccgttcagggttacaccgtaagcggccagtcgaacgaaatcgtacgcaacaactatggcgaatgctggaaaaacgcctactttgataaagcaagccaaggtcgcgtagaatgcggcgatgcggttgctgcccccgaacccgagccagaacccgaacccgcacccgcgcctgtcgtcgttgtggagcaggctccgcaatatgttgatgaaaccatttccctgtctgccaaaaccctgttcggtttcgataaggattcattgcgcgccgaagctcaagacaacctgaaagtattggcgcaacgcctgagtcgaaccaatgtccaatctgtccgcgtcgaaggccataccgactttatgggttctgacaaatacaatcaggccctgtccgaacgccgcgcatacgtagtggcaaacaacctggtcagcaacggcgtacctgtttctagaatttctgctgtcggcttgggcgaatctcaagcgcaaatgactcaagtttgtgaagccgaagttgccaaactgggtgcgaaagtctctaaagccaaaaaacgtgaggctctgattgcatgtatcgaacctgaccgccgtgtggatgtgaaaatccgcagcatcgtaacccgtcaggttgtgccggcacacaatcatcaccaacactaaggctaggcaatatcttgccgatgcatgaggttagtggattttgtaccaggtactgttgcaatattcgtgaaacgtcggtcggcatcgatgatgtgaaacaaacccccgcttttgcggggtttgtttttttgggtggttttctgaaacggctatcgtcagaatcggggtgcaggttcggattcggattcagattcagattcagattcagattcagattcaggtttgtgtcccattgccgcgctttatagtggattaacaaaaatcaggacaaggcgacgaagccgcagacagtacaaatagtacggaaccgattcacttggtgcttcagcaccttagagaatcgttctctttgagctaaggtgaggcaacgctgtactggtttaaatttaatccactatatcggttgaaactctgattttaaggcggtaggatgtgggtttgcccatagaaagggaatcctttctgtatcaagccctgaaagggataattcatacaaattcacgcctttccccctcattgggaaatggatggaatcgtgccagatgtgtgcggcactgtatgccggatatggttttatcatcagcccttttcggttgaaaccccgtcagttgcagcgattgagcctaatcggtggcggaagttgccgctttgcattcggggcggcgtgcagtgcggtgctttgatatgccgtttgtgtgttgaaacagggtggtcggtgcatacgggtacggtatggccaaagctaaaagtgaaatacgctgaaacactgaatgagccgctttattgtttgtacggcctttgctgccttgctatgatttaaattggattcgcccgccggatattttgggatatgaaagaatttgacttcatcaaacggtatttgcaaacaggcacggataatgatgtcgtattgggcataggcgacgatgcggcgattgtccgcccgcgtgaaggcttcgatttgtgtttcagtgcggatatgcttttgaaggacaggcatttttttgcagatgtcaaacctgaagacttggcttggaaggttttggccgtcaatatttcagatatggcggcgatgggtgcgataccgcgttgggtgttgctgagcgcggctttgcccgaattggatgaggtatggctgaaacggttttgcggcagctttttcggtttggcaaaaaagtttggcgtaacgttaatcggcggcgatacgaccaagggcgatatggcgttcaatgtaaccattatcggcgaattgccgaagggtagggcgttgcggcgtgatgcggcggttgcgggcgacgatatttgggtgtcggggcgtatcggtatggcggcggcggctttgaactgccgtctgaaacggtgtgtgttgccagatgaagtgtttgccgaatgcgaacaaaagctgctccatcctgaaccaagggttgggctggggcttgcgctgttgccgtttgccagggcggcgcaggatgtttcagacggcctcgcgcaagatttggggcatatcctgaccgcttctggcaagggtgcggaaatttgggccgattcgctgccgtctttatccgtattgaaagatattttgccccgagcgcaatggctgtcttatactttggcgggcggcgacgattacgagctggtgtttaccgcgccggaaagttgccgcagccgcgtatttgatgcggcggaacggtgcggcgtgccggtaacgcgcatcggcaaaatcaacggaggatgccgtctgaaggttttagatgccgacggcagggaattggaactacattctttaggattcgatcattttggctgattttaaacctgactttgcgtggctgttgaaacggccgttgtgttttttggctttcggtttcggcagcgggctggctccgttcgcgccgggcacattcggcactttggcggcactgcctttggcgtttgtgctgattttgctcggcatagacgggctactgctggcttttttgtgtatcgtgctgtttatgtggggcatacgcatttgcgcttatgcggaacgtgaaacgggtgtcagcgaccacggtgggattgtttgggacgagattgtcgccatgctgtttgtgctggcgtttgtgccgttcaggtggacgtggtggctggcggcatttgtcctattccgtctgtttgacgcgctcaaaccgtctcccgtcggttggtttgacaagaatctgcacggcggtttgggcattatggcggacgatatggcggctgcggtgatgactttgattgtcttgaggattgcaatgctgttttaaacggtgctgccttgtaaaaatgccgcctgaaagcctttcagacggcattgtttcggaggttaacgcgttaccggtttgtatttgatgcgtttcggtttcgcgccttcttcgcccaaacggcgtttcttgtcggcttcgtattcctgatagttgccgtcgaagaacacccatttagagtcgccttcacacgccaagatatgcgtggcgatgcggtcgaggaaccaacggtcgtgcgaaatcaccatcacgctgccggcaaattccaacaatgcgtcttccaacgcgcgcagggtttccacgtcaaggtcgttagacggttcatccagcagcaatacattgccgccgctcaacaaggtttttgccaagtgcagacgaccgcgttcgccgccagacaattgacctgcaattttgctttggtcgctgcctttgaagttgaaacgccccaaatattggcgggcgggaatttcaaactgaccaacctgcaaaatgtcgcggccttcggcaatgttgtcgaacacggttttgtcgttttgcaaaccttcgcggctttggtcaatcaagctcattttcacggtttgtccgattttcacctcgccggaatcaggctgctctttgcccgaaatcattttgaacagcgtagatttacccgcgccgttcgggccgatgatgccgacaatcgcgcccgcaggcactttgaagctcaaatcgtcaatcagcactttatcgccgaacgatttggaaacatttacaaattcaatcacttcgttacccaaacgctcggcaacgggaataaagatttcctgcgtttcattgcgtttttggtattcgtagttgctcatttcttcaaaacgagccaaacgcgctttggacttggcttggcggcctttggcattttggcgcacccattccaattcctgcttcatcgccttcacgcgcgcggcttcggattttgcctcgttttccaagcgtttttctttctgctccagccaagacgagtaattgcctttccacggaataccatggccgcggtcgagttccaaaatccattcggcggcgttgtcgaggaagtagcggtcgtgcgttaccgcaacgactgtgccggggaagcgcacgagaaattgctccagccactcgaccgattccgcatccaagtggttggtcggctcgtccagcaaaagcatatcgggcttgctcaacaagagtttgcacaaggcaacgcggcgtttttcaccgccggacaaattatcgattttggcatcccattccggcaggcgcagcgcgtcggcggcgatttccaattcgtgttccgcaccgccgcccgtggacgaacctgccgcaataatcgcttccaagcggccctgctcttctgccaacgcgtcaaaatccgcatcaggattggcgtactcggcatacacttcttccaaacgtttctgcgcggcagccacttcgcccaaaccgctttccacttcctcgcgcacggttttttccggatcaagctcaggctcttgcggcaggtagccgattttgatgccgcccatcggcacggcttcgccctcaaattccttatccacgcccgccataatccgcagcacggtggacttgcccgcgccgttcaaaccgagcaggccgattttcgcgccggggaagaaagaaagggaaatatctttaatgatggttttctgcggcggcacaaccttgctcacgcgcagcatagaatagacgtattgttgggacatggttttctcgttttcatcaaacaaatttcagacggccattttaaccgataatttgatttaagccagtttatccgcgaaccggtattgccaaaatcgggcaggattcataaaatccgcttatccctttgaaattatatagacaaaaaaataataatgataggggatcgccgccccggcaaccatttcggattttccaaagcaaatatagtggattaacaaaaatcaggacaaggcgacgaagccgcagacagtacagatagtacggaaccgattcacttggtgcttcagcaccttagagaatcgttctctttgagctaaggcgaggcaacgccgtactggtttttgttaatctactatacttttcaaatcaaaaaaggatttaccttatgtcggaatatacgcctcaaacagcaaaacaaggtttgcccgcgctggcaaaaagcacgatttggatgctcagtttcggctttctcggcgttcagacggcctttaccctgcaaagctcgcaaatgagccgcatttttcaaacgctaggcgcagacccgcacaatttgggctggtttttcatcctgccgccgctggcggggatgctggtgcagccgattgtcggccattactccgaccgcacttggaagccgcgtttgggcggccgccgtctgccgtatctgctttatggcacgctgattgcggttattgtgatgattttgatgccgaactcgggcagcttcggtttcggctatgcgtcgctggcggctttgtcgttcggcgcgctgatgattgcgctgttagacgtgtcgtcaaatatggcgatgcagccgtttaagatgatggtcggcgacatggtcaacgaggagcagaaaggctacgcctacgggattcaaagtttcttagcaaatacgggcgcggtcgtggcggcgattctgccgtttgtgtttgcgtatatcggtttggcgaacaccgccgagaaaggcgttgtgccgcagaccgtggtcgtggcgttttatgtgggtgcggcgttgctggtgattaccagcgcgttcacgattttcaaagtgaaggaatacgatccggaaacctacgcccgttaccacggcatcgatgtcgccgcgaatcaggaaaaagccaactggatcgaactcttgaaaaccgcgcctaaggcgttttggacggttactttggtgcaattcttctgctggttcgccttccaatatatgtggacttactcggcaggcgcgattgcggaaaacgtctggcacaccaccgatgcgtcttccgtaggttatcaggaggcgggtaactggtacggcgttttggcggcggtgcagtcggttgcggcggtgatttgttcgtttgtattggcgaaagtgccgaataaataccataaggcgggttatttcggctgtttggctttgggcgcgctcggctttttctccgttttcttcatcggcaaccaatacgcgctggtgttgtcttataccttaatcggcatcgcttgggcgggcattatcacttatccgctgacgattgtgaccaacgccttgtcgggcaagcatatgggcacttacttgggcttgtttaacggctctatctgtatgcctcaaatcgtcgcttcgctgttgagtttcgtgcttttccctatgctgggcggcttgcaggccactatgttcttggtagggggcgtcgtcctgctgctgggcgcgttttccgtgttcctgattaaagaaacacacggcggggtttgagcgatgagcgatacccccgctacccgcgatttcggtctgatcgacgggcgtgccgtaaccggctatgtgctgtccaaccggcgtggtacgcgtgtctgcgtgctggacttgggcgggattgtgcaggaattttccgttttggcagacggcgtgcgcgaaaacctcgtggtgtcgttcgatgatgcggcttcctatgcggacaatccgtttcagattaacaaacagatagggcgcgtggccggacgcatccgcggtgcggcgttcgacatcaacggcaggacttaccgcgtggaggccaacgaaggcaggaacgcgctgcacggcggttcgcacgggctggccgttacccgtttcaacgcggtggcggcagacggccgttcggtggtgctgcgcagccgcctgcaacagtcggccgacggttatcccaacgatttggatttggatatttcctaccgcttggacgaggacgaccggcttaccgttagctatcgcgccaccgcgctcggcgacacggtgttcgacccgacgctgcacatttactggcggctggacgcgggcctgcacgatgcggttctgcatattccgcagggcggacatatgccggccgatgccgaaaaactgcccgtctcaacggtttcagacgacctcgaagtatttgatttcagccggcccaagccgctggatgccgccgttgccgccctgcgccgcgaaacgggtcgggccggttttgacgacgcttaccgcgtgccgtccgatataggccgtcccgccgctgtgttgcaagccggacgccgccgtcgtatcagcatatacagcgaccgcaatggcttggtcatctttaccgccgccccgcaggatttcgcgcggcacgatgcgggcgtttacgacgcgctggcgaccgaggcgcagacgctgcccgacagcctgaattggcccgagttcggcaatattcgtctgaacaagggtgataccagggaggcgacgattgcttacggcatcgaatccctttcttaggagcttcctaacaccggttgcagacgacctttttatagtggattaacaaaaaccggtacggcgttgcctcggcttagctcaaagagaacgattctctaaggtgctgaagcaccaagtgaatcggttccgtactatttgtactgtctgcggcttcgtcgccttgtcctgatttttgttaatccactataagatttcaccattccctcaaatcaatccaaacaggagcttcataaatgtacacaagaatcatggaaatcagcccttggacgctgcgttcggcaaaactggaaaaagaacacaaacggctgcaagagagcctgaccagcttgggcaacggctatatgggtatgcgcggcagctttgaggaaacctattccgccgacagccacttaggcacctacatcgccggcgtgtggttccccgacaaaacccgcgtcggctggtggaaaaacggctatcccaaatatttcggcaaagccatcaacgcgttcaatttcagcaaagtcaaaatctttgtcgacgggcaggaagtggacttggcgaaaaacgacgttgctggcttctccgtcgaactcgatatgcagcacggcgtgttgcgccgctcgttcaccgtattcggtgtgcgtttcaatgtgtgcaaattcctgtctgtcgcacaaaaagagctggcggtcatccgctgggaagccgtatccgttgacggtaaaacccaccaagtccgcatcgattccatcatcgatgccgacgtgaaaaacgaagactccaactacgaagaaaaattctggcaggtattggacaaaggcgtttcagacagtctctcctacattgccgcccaaaccgtcgccaatcccttcggcgtggaacaattcatcgtcaacgccgagcaaacctttgccggcagcttcaaagccctcggcggcagccaaaccgactggcaggtctccaattcttttgaatccgaagtcggcagcacacccgaaacctttgaaaaacgcgtgattgttaccaccagccgcgattatcagagcttggaagcagtgaaagccgcaggccgcgccttgtcggaaaaaattgcaggcgttgcgtttgaaaccttgctggacgcgcacaaagcaggctggctgcaccgttgggaaatcgccgacgtggtcatcgaaggcagcgacgaagcgcagcagggcatccgcttcaacctgttccaactgttctccacctactacggcgaagacgcgcgactgaacatcggcccgaaaggctttaccggcgaaaaatacggcggcgcgacctattgggacaccgaagcctacgccgtaccgctctacctcgcactggccgaacccgaagttacccgcaacctgctgcaataccgccgcaaccaactgccgcaggcgcagcacaacgcgcgcgaacagggcttggcgggcgcactctatccgatggtaacgtttacgggcatcgagtgccacaacgaatgggaaatcaccttcgaggaaatccaccgcaacggcgcgattccttacgccatctacaactacaccaactacaccggcgacgagggctatcttgccaaagaaggcttggaagttttggtcgaagtgtcccgcttctgggcggaccgcgtccacttctccaaacgcaacggcaaatacatgattcacggcgtaaccggtccgaacgaatacgaaaacaacatcaacaacaactggtacaccaacaccctcgccgcatgggtattggactacacccgcgaagccttggcgaaatacccgcgtccggatttgaacgtgcgtgccgacgagttggaaaaatgggcggacatcagcgcgaatatgtaccgtccgcatgacgaagaactcggcgtattcgtgcagcacgacggcttcctcgacaaagacatccgccccgtgtccgcgctttcgcccgacgatttgccgctcaaccaaaaatggtcgtgggacaaaatcctgcgttcgccctttatcaaacaggcggacgtattgcaaggcatctacttcttcagcgaccgtttcaatatcgacgaaaaacgccgcaacttcgacttctacgaaccgatgaccgtgcatgaaagctcgctgtcgccctgtattcactctattctcgccgccgaactgggcaaagaagaaaaagccgtggaaatgtaccagcgcaccgcccgcctggacttggacaactacaacaacgacaccgaagacggcctgcacatcacctccatgaccggctcgtggctcgccatcgtccaaggtttcgcccaaatgaaaacctggggcggcaaactcagcttcgcaccgttcctgccgagtgcgtggacaggctacgccttccacatcaactaccgcggccgtctgattaaagtcgccgtcggcaaagaaaacgtcgtcttcactctgctcaaaggcgagtcgctcgatttgcaggtgtacggcaaagacatcacgctcgacggcagccacaccgttgcgttggaaaaataaggagggcgcaaaatgactttcactgcagtcctatttgacctcgacggcgtcatcaccgacaccgccgaataccactaccgcgcatggaaaaagctcgccgaagaactgggcatcagcattgaccgcaagtttaacgagcagctcaaaggcgtgtcgcgcgacgattcgctcaaacgcatcctcgcgcacggcggcaaaaccgtcagcgaagccgagttcgccgaactgacccgccgtaaaaacgacaactacgtcgagatgattcaggcagtcaaacccgaagacgtgtatcccggcattttgcccctgctggaagcattgagggcaaacggcaaaaaaatcgcccttgcgtccgccagtaaaaacggcccgttcctgctggaacgcatggggctgacccacttcttcgacgccattgccgaccctgccgccgtcgcacattccaaacccgcccccgacatcttcctcgcagcagccgagggcgtagatgcggacatccgccaatgcatcggcattgaagacgccgccgccggcgtcgccgccatcaaagccgccggcgccttgcccatcggcgtgggcaaagccgaagacttgggcagcgacatcgcgctggtctccggcaccgccgagctgacctacgcctacctgcaaagcgtgtgggaacagtcgggcaggtaaaacgcgtcagataaagtgtcaaggaagcaaaagaccgtctgaacagtgtttcagacggcctttttgcttttagaacagaatgataacccaacttacgcaaccctaaaaactaaatgccaatctcttaaccatgctattcaaatttatttgaacgattttttttctaaccagccaaccttaacaatcactattaaaatgcgcgccgatgttctgtctccgcctgtatgcggcttgggcgacggcgaggctgcattcgagcaggttgcggttttcgtattcggacgcggtgtgcggttcggcttggttttgcttccaaagctgcagttgggcgatggcgcggcgcaggccggtatcgttgcgtaggatgcctagatggcgttggttgaacgtttgcaggacggggcggctgaatgtgttttgaaggtcgtctgaaaagatgcctgcttcggcggagaggctttcagacggcctttggaatggttcggcttggaatgcttgtccgtctgcgatggcttgggcgcagagccttgcggtcacgacgcattcgagcagggagttgctggcaaggcggttggctccgtgcagcccagtgcaggcggtttcgcccaaggcgtagagctgcggcagggaggttctgccgcaggggtcggtttggatgccgccgcaggtgtagtgttgcacggggcggacggggatggcttggcgcgtgatgtctaggccgcattgggataaacagtgtcgatggatggatgggaaatgccggcggacgaacgctgcgggttgatggctgatgtcgagcgagacgaagtcttgcgtttgtttggcgatttcggctgcgatggcgcgggcaacgatgtcgcgcggtgcgagttcggcgcggcggtcgtaatgcggcataaatcgttcgcccgcttggttggtcaggatgccgccttcgccgcgcacggcttcggaaatgaggaaggtgcgtccgttttcagacggtcttgccaagcctgtggggtggaattggataaattcgaggtttccaactgcgcagcctgcgcgtatcgccatggcgatggcgtcgcccgtgcattcgggcggcgtggtggtggcggcgtaaatctgtcccaagccgccgcctgcgagtacggtatggcgggcgcggatgcggtaggtttcttgtgttcggcagtcgaggacggtcagtccgcacgccgcgcctgattcggtttgaatgtccaacgccatctgccgctcgcaaacgcggatgttcgggcggcggcgtatttgggcaatcaggctctgcatgacggcttcgcccgtgtagtcggcgacgtgggcgattcgtcggcaggtatgcccgccttcacgcgtcaggtgcaggccgttatgattccggtcgaacgccacgccctgcgccagcagccattcgattgccggtttgccctgcgacaggatggcgcggacggcggcttcatcacacaaacccgcgcccgcttccaaagtatcggcaacgtgtttttcgatgtcgtcctctcccgaccacgccgccgcaatcccgccttgcgcatgacggctggcggtgtcgtccagccggtttttgcacaaaataacgatgcggaacgattcaggcagcgacagggcgagcgtcagtgccgccagcccgtttccggcaatcaatacgtcgcaatcggtttgcatggtgttgtccttgtttgagaggccgtctgaaacggtatagtggattaatcaatgccccgacatatgcgacatggtattgagaagcaccacgcccagcaaaatcaaaccgatgctgacaatcccaatgaaatcagctttctcaccgaaaaacaccacgctgactaaagccgttaaaaccagtcccacgcctgcccaaatggcgtatgctgtagccagcggcatggttttcagtgtcatagacaaggcccaaaaacacaccgaaaagctgactaccacgccaatagaaggccacagtttgctaaacccgccactcagtttgagcatggaagaaccgcagacttcgcttaaaattgctacagtcagaaagagccagtgcatttgcatgtttttacctgataaatgaaagaaagtataattatatcaatgcaataaaataaaaaaacagtcttgttgttaaagattttttgtgtgcaaatcccgtcttgggaaagcaggcgggcggtattttcaggctgcacccattacgaacgacaaatcaggcggggcccatgccgttgaacacatcttttttcttcagccctgccgcaaagtcgagcatacgctgcaaaggcagtttggcggcttcgcccagcttcctgtccaacaggatttcgttacgtccgcttgtcagggcgtatttgatgccgcccagcgaattcatcgccatccacgggcagaacgcgcagcttttacagcttccaccgttgcccgccgtcggcgcggcgataaattgtttgtcgggcgcctgcttttgcatttcgtgcaggatgcccaaatcggtcgccacgatgaattttttttcaggacgcgatacggcggctttgagcagtttgctggtcgagccgaccacgtcgcccagttcgatgacgctttgcggcgattcaggatgaaccagcaccaccgcttcggggtgttccgccttcaacgccgccagctcttgccctttgaattcgttgtgaacgatgcacgaaccctgccacaacagcatatccgcgcccgtttcgcggcagatgtagtcgccgaggtggcggtcgggtccccaaatcagcttctcgccgcgtgatttcaaatacgatacgatttctaacgccaccgaagacgttaccacccaatcggcacgcgctttcacggcggcggaagtgttggcgtacaccaccaccgtgcggtcggggtgttggtcgcaaaacgctgaaaacgcttcttccgggcaacccaaatccaaagaacattccgcctccaaatcaggcatcagcaccgttttttcagggcagaggattttcgcgctctcgcccatgaagcgcacaccagccaccaccagcgtaccggcttcgtgttccgcaccgaagcgcgccatttccagcgaatcgcccacgcatccgcccgtctccaaagccaaatcctgaatcagcggatcaacgtaataatgcgccaccaagaccgcgtttttctccttcagcaaagccttgatttcgtctttcagacgatctgccgtctcgcggtcgggcgtgtcggcaaccttcgcccacgcctgacggatttggcaggcggaagtcggcgtttggatgagtggcatatcgtagtcgaacgagcggcgggcggcggtttgcatgatgtttccttgtagctgtttttcagacggcatgaaggtttgccgtctgtttttcaaactgtttttacattatgctcaacttgagtataatatgcaaggtcgtctgaaaacaggtttgcaataccgtaaaaccgacccgcttcgttccgacaaaccgctttggtttacaataaagcctttcccacccgcagaaagccgagcatggatgcctaccccgaagccgaagccccgccgcaaagcatcgtcgagctggttcccgtattgattgccgttaccgacggcggcctgcgggtattgaccgtcgcccaaggcatgctcctgcccaacggcccgctctcccccctgcgcaattccttgcaggcaggcgtaaaactgtgggtcgccaagcagacttcgcagcctatgggctatgtggaacagctttacacctttgtcgatacccaccgccgcaacgaacacggcatgcccgtgctgtacgtcagctatttggggctggtgcgcgaggcagccgacagcatcctgcacccggatgcgaaatggcaggactgctacggctatttcccgtgggaagacttgcgcaccgacggcgggcagcgcgacgccgtcgtcggccgcctgcgcatttgggcaaactcggcggacacggaggaagtgcgccaaaagcggctcaagcgcattcatttgtgctggggggtcgaaccggaaaactggtcggaagaatacgttttgcaacgctatgaaatgctgtatgaaagcggcctgatagcggaagccgccgagccgcaggcaaacttcgacttcgcgcttacggggcagcccatgcgccacgaccaccgccgcgtactggcgaccgccctgtctcgcctgcgcgccaaaatcaaataccgccccgtgatttttgaactgatgccgcccgaattcacgctgctgcaactgcaaaacagcgtcgaagccatcagcggcagattgctgcacaagcaaaacttccgccgccagattcagcagcaaaacctcatcgagccgtcggataccggcgtatcgggcagcaaaggccgtcccgcgcagctttgccgcttccgcgacgacgtcctgcccgacaggctgatttcggacatcggactgccgctgggcagccgttagcccgttttcagacgacctatagtggattaacaaaaatcaggacaaggcgacgaagccgcagacagtacaaatagtacggaaccgattcacttggtgcttgagcaccttagagaatcgttctctttgagctaaggcgaggcaacgccgtaccggtttttgtaaaatgaagttttgccccatcggtgcaacatcaatctttttcaacaaaggaaaccccatgccgtctgaaaaaaccctctttcccctgcccgacaccctgttgcgccccatagtagaacaagccttgagcgaagacttgggcaggcgcggcgatattacgtccgccgccgtcatcgcccccgacaaaaccgccaaactcttccttgtcagccgcgaagacggcgttatcgccggcatggacttggcgcgtctcgcctttcagacgatggatccgtccgtccgcttccaagccgaaatccgagacgggcaagccgtccgcgcaggtcagacgcttgccgccgtcgaaggcaacgcccgcgcgctgctcgccgccgaacgcaccgcgctcaactacctcacgcacttaagcggcatcgccaccgccaccgcgcgtgccgttgccgaagtcgccgaatacggtacagacatcgtgtgcagccgcaaaaccatccccctgctgcgtgtcctgcaaaaatacgccgtcagggcaggcggcggtgtgaaccaccgcatgggtttggacgacgccgtgctcatcaaagacaaccacctcgcctattgcggcagcatcgcccaagccgtgcagcaggcaaaacaggctgtcggagcattgacctgcgtggaaatcgaagtggatacgttggcacaactggacgaagccatcgcagcgggcgcggaacggattttgctggataacatggacgacgaaaccctgaaagaagcggcaaaccgctgccacacgcaaaccgcccacccccacaccatctattgcgaagcatcgggcggcatcggcttcgaccgcctgaagcgcgtggcgcaaaccggagtggacggcatcgccctcggctatctgacccacagcagccgttcgttggacataggtttggatttcgtggcgtgagttttagggtgcgggcggctgtctgatatgtcaggcaaggaaccgcttaaccctaatccggttattgcctcagggaggaaatgccgtctgaaagattcttcagacggcatttttcgtaaaggtcgtgatgctttagaaaaaacagcatttcaggcaggtattttgtttgcccgacagcgcggcggcatcggtagggcaggaaaaaggacggggggcggcagttttatgccgtctgaaagcccgcctttacgcttgtttgcaaaaaaagtgggaaaaggaacatacaatcctgtacaatcatccataaatatttgatttataatacgatttataaagataatcacaatcatccatatctgccgcccgtcaatccgcttggcgggcggcaaaggttttaggaataccgatgaacacaataccgctccacaccatactcaaacttatggcgcatcccgaacgtatggcgatactgattcaattgttggacagcgaacgcaatatcgccgaactggcaaaatccttatccctgccggccaccgcagtttccaaccatttgaaccgcctgcgcgtggaaggtctagtcgattttacgcgttaccaccgcattatcgaataccgcctggtttccgaagaagcggcggcgattctgcacacggttcgcgatttggaaaacaaacgcgtggcatagtgttagaatcctttccttttgccgtctgaacgtttcagacagcatttttcggaaatgttatgaaaatcaccacttggaatgtcaattcgctcaatgtgcggctgccgcaggtgcaaaacctgcttgccgacaatccgcccgatattttggttttgcaggaactcaaactcgatcaggacaaatttccggccgccgctttgcaaatgatgggctggcactgtgtttggagcgggcagaaaacctacaacggcgtggcaatcgtcagccgcagcgtgccgcaggacgtgcatttcggtttgcccgcactgccggacgatccgcaacggcgcgtgattgcggcaaccgtcagcggcgtgcgcgtcatcaatgtctattgcgtcaacggcgaggctttggacagccccaaattcaaatataaggaacagtggtttgccgcactgacggagtttgtccgcgatgaaatgacccgccacggcaaactggtgttgctgggcgatttcaatatcgcgcctgccgatgcggactgttacgaccctgaaaaatggcacgaaaaaatccactgttcgtccgtcgaacggcagtggtttcaaaacctgctggatttgggactgaccgacagcctgcgccaagtccatcccgaaggcgcgttctatacctggttcgactatcgcggcgcgatgttccaacgcaaactgggcctgcgtatcgaccatattttggtgtcgcctgcgatggcggcggcgttgaaggatgtccgcgtcgatttggagacgcgcgcgctggagcgtccgagcgaccacgcgccggtgacggcagaattcgattggtaaaagaccgtgttttgatatggcgttgacaagcatccttatcttcaatttattcaataggatagctttctatctgactgaaaaataattgcctttccccggcaaacagccgaaatcggcggattgttcaaacacagcctattttcctgaaaaatttatgaaatacatagggttaatatcagattttggagcagtaaaatttattatgtacactaatccaaaacaaaatcaaatattgaaaactagatttattttcgaataaatagaaagccgtcttatatatagtaataaattaataaccctgtttttcctattgcctttattgtgccatgcagttgagtttgatgaaactcaatataacgactgtaaagataaatctatgttatgtgctgtcagaattgattctcccaaaggcaataactatagtggattaacaaaaatcaggacaaggcgacgaagccgcagacagtacaaatagtacggcaaggcgaggcaacgacgtactggtttaaatttaatccactatataaatctatgtggtttgacaatggcaagttagtatttatatcctttactaatcaacaaatggaaaatcaaagtcgcccatctctagcgatgtttattagtgatgacaaaatatccagtaccaatattgatgaatttttagcatctttcgatcctgataaatatcgaatatttcatgatccaagatataaatttttacctagtatgtcgaactcattgtaatccttattctctttttgatattgatagcaaatataaacctgatgagaaagataaaatctttttttcaatcccgacagataacacagatttttataagggtttttatttaaataaggattatatagaaggtatatatcctagtaggcataatggcagctattacaaaatatagtggattaaatttaaaccagtacagcgttgccgtactatttgtactgtctgcggcttcgtcgccttgtcctgatttttgttaatccactatatctgcatcagtttcatgaaacgcaagtcggaagcgtcaaacaactgattgcccattttgaccggctgattgacgaattggacaaacaaatcgacgaccacacccacacgcattttgacggcaaagcccaagtggcagaacaaatcaaaggcatcggttcgataacgacggctacgctgatggcgatgctgcccgaattgaggcggctgtcgcacaaacggatagcgggtttggccggcattgccccgcacccgagggagagcggggaaaccaaattcaaaagccgctgctttggcggaaggtctgcggtgcgtaaggcactgtatatggctaccgtggcagcgacacgttttgaaccgcttattcgggatttccaccaacgcccgctgtccgagggtaagccgtataaggttgccgttacggcatgtatgcgcaaactgctgacgatatcgaatgcccggatgcgtgattattttgccgaaaacgataccgccgaaaacggtatctaaacggcttgatttgagttttggtatttttgcccgacggggtgaaaaatacagttgctacggctcgatgaatcgtcagaaatacctgcatcgtcattcccgcgcaggtgggaatccagaccggtcggtgcggaaacttatcaggtaaaacggtttcttgagatttttcgtcttggattcccactttcgtgtgaatgacggaatgtaggttcgtgggaatgacgtggtgcaggtttccgtatggatggattcgtcattcccgcgcaggcgggaatctagtctgttcggtttcagttattttcgataaatgcctgttgcttttcatttctagattcccactttcgtgggaatgacgggattttaggtttctgattttggttttctgtccttgtgggaatgacgggatgtaggttcgtaggaatgacgtggtgcaggtttccgtgcggatggattcgtcattcctgcgcaggcgggaatccagtctgttcggtttcagttatttccgataaatgcctgttgcttttcatttctagattcccactttcgtgggaatgacggttcagttgctacggttactgtcaggtttcggttatgttggaatttcgggaaacttatgaatcgtcattcccgcgcaggcgggaatctggaatttcaatgcctcaagaatttatcggaaaaaacaaaacccttccgccgtcattcccacgaaagtgggaatctagaaatgaaaagcaacaggaatttatcggaaatgaccgaaactgaacggactggattcccgcttttgcgggaatgacggcgacagggttgctgttatagtggatgaacaaaaaccagtacggcgttgcctcgccttagctcaaagagaacgattctctaaggtgctgaagcaccaagtgaatcggttccgtactatctgtactgtctgcggcttcgtcgccttgtcctgatttttgttaatccattataaaaatgccgtctgaaaggttttcagacggcattggttcacgggccgcgcccgggtatttcggcaaaatcagtcggcgaccgccatcaggctggcgttgccgccggcggctgtggtgttgacgctgcaagagatttcttcaaacacttgcaggatgtcgagtccgttttccgaagggaggatgcggatgagtgcgccgtcgtgggcggcaagttcctgtttgcgcgcgctgtccaaaggcgacagggcggcaacgtggctgatgccggcggtttcgggtttgccgttgaccagcagcagaccttccaagtcggcagtgtaggaagccaaggggctgtcgggttcgaccactgcctgtatgccggaggcggcaagttcggtcagtgcggcaaaggcttgaaccgtgctgccgccgtgtatccaaacgcgtttgggcgcgtgccatgagatgctgttgcgctcgccggtcggtccggtaaggacggtttcggcacggcgcagggtgcggatgcgggcgtgtcccaaagcggccgctgcggcttttttctcttcggcgttgaacggtagtttgtgaaccagtgcttcgaggcgtttgagtgcggcttcgtccgcctgtccgatttggctcagggtcggggcaacccattcgccggcgcgggtcagtttttgcaggtagaacgaaccgcctgctttggggcctgtgccggacagaccgtgtccgccgaagggctgtacgccgacgactgcgccgacgatgttgcggttgacgtaaacgttgccggcttcgatgcggctgcggatgtggcgtaccgtgccttcgatgcggctgtgtacgccgtgggtcagggcgtagcctttgctgttgatttggtcgatgacgttgtcgagttcgtcggcgcggtagcggacgacgtgcaggacgggaccgaagacttcgcgttgcagttcgttgaggttgttcaattcaaacaggatggggcgaacgaacgtggattttttggaatcgacatcggcggcggttttgacttcgtggtaggacttggcaacacctttcattttgttgatgtggttcaacaggttttgctgtgcttcggcatcgatgacggggccgacatcggtagtgagctgaatcggtttgccgacgacgagttcgtccatagcgcctttgatcatgtcgagcatacggtcggcaacgtcttcttggacgcacaaaatgcgcagggcggagcagcgttgtcccgcgctgtcgaaggcggagttcaatacgtcggcgcagacttgctcggcaagtgcggtggaatcgacaatcatggcgttttgtccgccggtttcggcaatcaggacgggattgtcgccgcgtttggcaagggctttgttgatcaggcgcgccacttcggtcgagccggtgaaaatcacgccgccgatgcgggcatcgttggtcaatgccgcacccacgtcgcctgcgccgaggacgagttgcagggcggaagtcgggatgccggcttcgtgcatgagggaaacggcataaccggcaatcaggctggtttgttcggcgggtttggcgatgacggtgttgcctgccgccaatgcggaaacgacttcgccggtaaagatggcgagcgggaagttccacgggctgatggcgacaatcgcgccgacggcttttgcgtcttgaggcagggtatgttcggcttcgtttgcgtagtagcggcagaaatcgacggcttcgcgcacttcggcaatggcgttgttcagcgttttgcctgcttcgcgcacggcaagcatcatcagtgctggggtgtgctgctccagcaaatcggcaaaacggcgcaggcaggcggcgcgttcggcggcaggtgtcgcactccattcggggaacgcggcaacggctgcgccaaccgcttcttgggcaagcgcggcatcggcaaagctgactgtgccgacgatgtcgtcgtggtcggcagggtttttaatcggttgcgcttcgccgacatcgcgggctttgccgttgacgatggatgcggcgtggaagtcttgcgcggcggctttgttcatctgttcttgaagctgctgcaatacgttttcgttgctcaagtccacgccttgcgagttcagacggcatttgccgtacaaatcgcgcggcagcggcagggcgttgtgcaggtggatgccttgttcggcgatggtgtcgaacgggctgcggatgagcgtgtcgatgctgatgttttcatcgacgatttggttgacgaaagacgagttcgcgccgttttccaacaggcggcgcaccaagtaggcgagcagggtttcgtgtgtgccgactggggcgtacacgcgcacgcggcggcctaagttttgcgggccgacgacttggtcgtacagggtttcgcccataccgtgcaggcattggtgttcaaaatctttgcctttacccatttggtagattgcgcccaaagtgtaggcgttgtgggtggcaaattgcgggaataccgcgtcttgcgcggaaagcagtttgcgcgcgcaggcgaggtaggagatgtcggtgtggactttgcgggtgtaggtcggatagccgttcaagccgtccacttgcgcccatttgatttcgctgtcccaatacgcgcctttgacgaggcggatcattagtttttggttgttgcggcgggcaaggtcgatcaggtagtcgataacgaacggacaacgtttttggtaggcttggacaacgaaaccgatacctttgtagccagccaagtcagggtctgaaaccaaagcctccatcaaatccaaagacagctccagacggttggcttcttcggcatcgatgttgataccgatatcgtattttttacccaaaaggaacagctctttcaggcgcggcaacagttcgcccatcacgcggccgtgttgggtgcgcgagtagcgcggatggatggcggaaagtttgacggaaataccgttaccttcgtaaacgccttgtcctgccgcatctttgccgatggcgtggatggcttcgacatagtcgcggtagtagcggtcggcatcggcttgggtgtaggcggcttcgcccaacatatcgaaggagaagcggtagcccattttttcgcgttctttgccgttttgcagggcttcttcaatggtctgtccggttacgaactgtttgcccagaagccgcatggcgtaatttacgccttggcggatgagcggtgcgccgcctttgctgatcaggcggctgagtgcggaactcatttgtttgtcgtttgtggcggtcagtttgccggtaatcagcaggccccaggcggcagcattgacgaagagggaagggctgttgttcaaatggcttttccagttgccgtctgaaatcttgtcggcaatcaggcggtcgcgcgtggcgttgtcggggatacgcagcagggcttctgccagacacatcagcgcgatgccttcttcgctggagagtgaaaactcgtgcatcagcgcatccacgccgccggctttggtgcggccggcgcggacttgggtaaccaaacggcgggcaagctcggaggcggcgttgcgctcttcgtcgctcatctgtgcacgttgcaacatatcctgtacggcttcgatttcattacggcggtaggcatcggttatcgcttggcgcagggcagtttgtgccggaaatgcaaaatgaaacattttttggattctccaaagtttttcggggggcaggcggcatcggtgcggcctgaatacggtaatatcgtaataaatccgcagatgaaatacaaggcttcaaatgcgggcagggtaggtgcttccgtttctttgaaaatgaaacgggtaaaacacaaataaggcctgtatgcaggcaaggtttatttgtgtttgacccggaaacgggttcagacggcacgaaccgggatgccgtgccgtctgaaaggggtttatcgggtggcgcggtaatctgcgtcggctttttcaaagcgttcttgggtttcgcgcgaaggttctttgttgaacagggaaaccaacacggcaacgatcaagcaaacaataaagcccggcacgatttcgtacatcgtcaacaagccgctttctcctgccgcttgagccggttttttcacccattccgcccatacgactacggttaacgcacctgcaaccatacccgacaacgcgccgtaggcagtgatgcgtttccacaatacggacagaatcacaatcgggccgaatgccgcgccgaaacctgcccacgcgtaagacaccagtcccaatactttgctgttcggatcggaagcaatcaggatggaaatcacggcaatcgccaagaccatcaggcggccgacccataccaattccgactgttgcgcgtttttacgcaaaaagcctttgtagaagtcttcggtaatcgcgctggagcaaaccaaaagctggcaggacagggtggacatcaccgccgccaaaatcgcgctcaaaataatgccggcaatccaagggttgaacagcagggtggaaagcgcgatgaagatgcgttcgtggttgccgctcatagaagaaactttgtcgggatttgcaccgaaatacgcaatgccgaaataaccgaccgctaccgcgcccgcaaggcacaacgccatccaagtcataccgatgcggcgtgcggataccagcgatttcgcgctttcggccgccataaagcgcgccaaaatgtgcggctgtccgaaatagcccaagccccatgcggcggtggaaatgatgccgatgacggtcgtaccggcaaacaggctgccgtattctttgcccgtgcctgcggcgacactttgaatcgcggcagacatctgttccgcgccgcccaagcccagatagaccatcacaggcgttaaaatcagcgcgaaaatcatcaaagaagcctgcagcgtatccgtccagcttaccgccaaaaagccgcccaagaaggtataggcgatggtcgcgcccgcgcccagccacattgcctgattgtaagtcataccttcaaacaggctttggaacagggttgcgcccgccacaatgcccgaggcgcaataaatcgtgaagaaaaacaggataatcagtgcggaaaccactttcatcaagtgtccgcccgcgccaaagcggtggaagaaataatccggcagcgtcagcgcgttgttggcgtattcggtatgtacgcgcagacggcccgccaccaaaagccagttgaaatacgcgccgaccaagaggccgatggcaatccaagcctcattcaaaccgctcaaataaatcgcgcccggcagacccatcaaaagccagccggacatatcggacgcgcctgccgacatcgcggtaacaaacgggcctaggctgcgcccgcccaaaatataatcgtcgaaattgcgcgtagaaaaataggcggcaagcccgatgagaaggactgcaaccagatagattgcaaaagtaatgtacatgggattcatgtgctattcctcgtctaaaacttcagaattacaggctttgaaattgcaagcaacttgcgcctgaaatgtttttctaataaaagtacaacggaaaatccggatacccgaaagggggattcggataaattatcttcaatcacaataagatatgtaataaaactatatgaaattgtaaataatccgtttcaggataacccaatttctgttgtttgcaaagcacttaatggcttaaaaagccgagtttgaaacgatgcgcgtcggaaaaatcatttaaaacagcatattgttttgtagtgtcttgtaatcgggcgttgcgcggaatatgaaatccgttttcaggcggcaggtgttttgaggtgtaatttagcaaccgcaaaggaggcgcggtatgttttgccgattatccgccgcccgttttcagacggcatttttccttatacaatagccgattgaatttgatatgttcaggaaggatacagattatgttcggcaagcagctttttgaggaagtcggctcgaaaatcagcgaaaccatcgccaacagccctgccaaagatgtggaaaaaaatattaaggcgatgctgggcggcgcgttcaaccgtatggatctggttacgcgcgaagaattcgacatccagcagcaggttttaatcaaaacccgtaccaaactggcggctttggaagcgcgtttggaaaaactcgaagccgcgcaaaatcccgaacgggcagcattggaagcggctgaagccgctgccgaagaagccgtcgccgaaatcaggcagcaaaccgaagccggcgaataaggtcgtctgaaatatgtcgcttgccttggtttacagccgcgccttgagcggtatgaatgcgccgttggtcgaagtggaagcccaccttgccaacggcctgccacatttcaacatcgtcggactgcccgatatggaagtaaaggaaagtcgcgaccgtgtccgtgccgccattattcaaagcggttttgaattccccgccaaaaaaattaccgtcaacctcgcccccgccgacctgcccaaagagtcggggcgtttcgatttgccgattgcaatcggcatccttgccgcatcggggcaggttgcgcccgaaaaactggaggaatacgagtttgcgggggaattggcactgtcggggctgttgcgccccgtgcgtggcgcgttggcgatggcgtggcagggtatgcaggcaaaacgtgcatttgttttgcctgaagaaaatgcaggacaagccgccgtgatgcgcggcattaccgtttacggcgcgcgctctttgggcgaagtcgccgcccatttgaacggcatcgaacctttggcgcaaaccgaatgccaagttcctcagatgccgtttgaacatggcggacaacctgatttgtgcgatgtgaaaggtcagcacaccgcgcgccttgctttggaaatcgctgccgcaggcggacacagcctcttgatgatgggtccgccgggaacgggcaagtctatgctctcccaacggctgcccggcatcctgccgccgctgaccgaagacgaattggtagaagtttgggcattgcgttcgctcctgcccaaccaccaacaacaactcgacagcaaccgtcctttccgcagtccgcatcacagcgccagcgcggcggctatggtcggcggcggttcggatccgcgtccgggcgaaatttcattggcgcaccacggcgttttgtttttggacgagctgcccgagtttgaccgcaaagttttggaagttttgcgcgaaccgttggaaaacggcgaaatccacatttcccgcgcggcgcgccaagccgtctatcctgccaaattccaacttgttgccgccatgaacccctgcccgtgcggttatctcgggcatcccgtcaaaccctgccgctgcacgcccgaaagcgtcgcgcgttaccgcagcaagatttccgggccgctgctcgaccgcatcgatttgaccatcgaagtcccgagcctgtccgccgccgaactgatgcagcaggaagcaggggaaagcagcgcgtccgttttggaacgcgttatcgccgctagagacaaacaatacgcacggcaaggcaaagtgaatgccgccttgagtgtcagtgaactcgacacatccgcccgcattcaaaaagaagcgcaggaagcattgggcggcctgctggaaaaactctccctttccgcccgcagcttccaccgcattatgcgcgtggcgcgtacattggcggatttggcgggcgacgaagaagtcggcagaagccacgtcatgaaagccataggtttccgtcgtgctttataggaatgggaatggaagcaggttttgcccaaatatggcgatattgttagaatatccgcccgtaagcaaacggcgttaatgccgtctgaaacacattaaggtatgtttatgaacaaattttcccaatccggaaaaggtctgtccggttttttcttcggtttgatactggcgacggtcattattgccggtattttgttttatctgaaccagagcggtcaaaatgcgttcaaaatcccggcttcgtcgaagcagcctgcagaaacggaaatcctgaaaccgaaaaaccagcctaaggaagacatccaacctgaaccggccgatcaaaacgccttgtccgaaccggatgctgcgacagaggcagagcagtcggatgcggaaaaagctgccgacaagcagcccgttgccgataaagccgacgaggttgaagaaaaggcgggcgagccggaacgggaagagccggacggacaggcagtgcgtaagaaagcgctgacggaagagcgtgaacaaaccgtcagggaaaaagcgcagaagaaagatgccgaaacggttaaaaaacaagcggtaaaaccgtctaaagaaacagagaaaaaagcttcaaaagaagagaaaaaggcggcgaaggaaaaagttgcacccaaaccaaccccggaacaaatcctcaacagcggcagcatcgaaaaagcgcgcagtgccgccgccaaagaagtgcagaaaatgaaaacgtccgacaaggcggaagcaacgcattatctgcaaatgggcgcgtatgccgaccgtcagagcgcggaagggcagcgtgccaaactggcaatcttgggcatatcttccaaggtggtcggttatcaggcgggacataaaacgctttaccgggtgcaaagcggcaatatgtctgccgatgcggtgaaaaaaatgcaggacgagttgaaaaaacatgaagtcgccagcctgatccgttctatcgaaagcaaataattatgaagctcaaacatctgttgccgctgctgctgtcggcagtgttgtccgcgcaggcatatgccctgacggaaggggaagactatcttgtgttggataaacccattcctcaagaacagtcgggtaaaattgaggttttggaatttttcggctatttctgcgtacattgccatcatttcgatcctttgttattgaaactgggcaaggcattgccgtctgatgcctatttgaggacggagcacgtggtctggcagcctgaaatgctcggtttggctaggatggcggctgccgtcaatttgtcgggtttgaaatatcaggcaaaccctgctgtgtttaaagcagtttacgaacaaaaaatccgcttggaaaacaggtcggttgccggaaaatgggctttgtctcaaaaaggctttgacggcaaaaaactgatgcgcgcctatgattcccccgaagctgccgccgccgcattaaaaatgcagaaactgacggaacaataccgcatcgacagcacgccgaccgttattgtcggcggaaaataccgcgttatcttcaataacggctttgacggcggcgttcatacgattaaagaattggttgccaaagtcagggaagaacgcaagcgtcagacccctgctgtacagaaatagccgaactcccgtatccgaaagaagcgcaagcaatggattttctgattgtcctgaaagccctgatgatgggcttggtagaaggttttaccgaatttttaccgatttccagcaccggacatttgattgtgttcggcaatctgattggttttcacagcaatcacaaggtttttgaaattgccatccagctcggtgcagttttggcggtagtgtttgaataccggcaacgtttcagcaatgtgttgcacggcttgggaaaagaccggaaagccaaccgcttcgtccttaatcttgccattgcttttatacctgccgccgtgatggggctgttgttcggcaaacaaatcaaagagtatctgtttaaccccttgagtgttgcagtcatgctggttttgggcggtttttttattttgtgggtggagaaacgccaaagccgagcagagcctaaaattgccgatgttgatgcattgcgtccgattgatgccttgatgatcggcgttgcccaagtgtttgcactggttccgggtacgtcccgttcgggcagtacgattatgggcgggatgctttggggcatcgaacggaaaactgcgacagaattctcgtttttcttggctgtgccgatgatggttgccgcaacggcttatgatgtcctgaaacattaccgatttttcaccctgcatgatgtcggtttgattctgataggctttattgctgcctttgtttcaggcttggtagcggtaaaagcgttgctgaggtttgtttccaagaaaaattatattccttttgcctattaccgcattgtttttggtattgccatcattatattgtggctgtcaggctggataagttgggaatgaaaccataaacccgacctgaagacattattcgggtcgggtttgtctggcgggctgatatagtgaattaacaaaaatcaggacaaggcgacgaagccgcagatagtacggcaaggcgagccaacgctgtaccggtttaaatttaattcactataaaatcaggacaggcggggcgataggtttaaagtcgattgcctgttttgaaggcagtggtttattctttatttgctggcaatcaggcaataaaaaagcacatacctttttacggtctgtgcttttttatctggtggaggtaagcgggatcgaaccgctgacctcttgcatgccatgcaagcgctctaccaactgagctatacccccgaaaatttggtggcgaatcagggactcgaaccccggacacaaggattatgattcctctgctctaaccgactgagctaattcgccgtttcgtgaagacgctattatatgtttttctgtttttttgacaagccgtattttttaattttgaattagttgactgtttttaaatgttaaaaagtttatgccgtctgaagcggattcaggcggcatgagggttagagtttgtggcagatgtcgccgaagcggaatcctgcccagtcgatgccgatattttttccgaatgcgatgactttaaacagttcgcccatttcatgctggtcaatcagtttctgaacggcagcagcttcacagatgtaggctgccgaatccgttttccccgtctgtgccaatagctcggtaatgcccaagttcaataagaaatgggattggggaaggtaacctatcaaatctaatccggcatccgtccctgcttgtgcaatgtcggtaaagttgacatgtgcggtcaggtcggccaatccgatgaagtcaaaaggattgtggataatgtgatgtcggtagtgtccgatcagagtaccttgattgcgttgagggtggtaatactgcgctgcatcaaaaccgtagtcgatgaatatcatgcagccgtgttcgagtcttgaggcaagggtgcggataaaggcatattgttgcggatgtagttcgctggtatagggataatctgtttgaggaaaatagagggaagccaaggcagatagctgcaagtcgtgcagcggtcgtgccgaataggtaaaacggtcattatctaggcaaacgccgacatgctcgaatgagccgccttcatttttacggacgatttcgacaggcatggcatcgagtacttcgttgccgatgatgatgccgtcaaacgcttcgggaagtgcggtcaagtggacaactttttgagatgcttccggtgcgcgtgcttgaatcaggtttttctgacgtgctgccagctccggcgatatttcaataatatagtaacggctgatgccgtccgaaatgctgcccaacaaatcggcggcaagctgtccggttcccgcgccgaattcatagatattgcccgccgtttgggatagaagttcttgaagttggcgtgccagtgtctgtgcaaacagagaggtgagggtcggtgcggtaataaaatccccggtattgccgattttatggctgccgccggtgtagtagccgtattgcggagcgtataaaaccaattccataaaacgtgaaaatggaatccagttgccgtgtttgccgattttttcggcaatgagggtttgcagtttgagcgagaattgccgtgcttcgggagaggggaggggcatgataagtgttagcttgtgtaaatttattggatttcccgacatattacacgttggtacgggtgctgtcatggctttatcttaatactatatattgtgtttatattattaaattaatcatatatagttgtttattggttcgattattctgtaccgcacccgccgtgccgttgtcgtcattttttatcttattgtttttaaaaggaataaaaatttcagatatgttaatgagttttcatgccctgatttgaccgagtgtttaaaatttcttatagtgtcgattggtggggaattgtggggcaaagtgtctcttttacccttgtgattttgatttcggcttgggacatgtcatgttcggcggcgcacacgaattaagcatcgacagtaaggggcggttggctgttcctgccaaattccgtgacattctgtcgcgcctctatacgcctgccgtagtggtaacgctcgagtcgaaacacaagctgttgatgtaccctgttgcggagtgggaaaaggttgcggcgcaacttttaaacttaaaagtggcggataaccctgttttgcggcggtttcaaaatcttttgctgcataacgcggaaattttggaatgggacagcgccggccgggtgctggtttctgccggactgaggaagagggtggatttcgaccgtgaagtcgttttggtcggtcgtgccaaccgtttggagctttggggtcgcgagcagtgggaggctgagatggttcaggctttggatgacgatcctgacgaacttgccttccagttgagtcagacggatttgcaattgtgagtggagcagaaagttaccggcatatcacggtcttgctgaatgaggcggtggatgcgcttgccgtgcgcgaagacggtgtctatgtggacggtacgttcggcaggggagggcattcccggctgattttgtcgcgtttgggcgatgcggggcggttgattgttttcgacaaagacccgcaggcgattgctgtggcagaagagctggcgcgttcggacaaacgggtcggtgtcgtgcatggcggttttgcttcgtttcagacggcattggacggtttgggtatcggcaaggtggacggtgcgctgtttgatttggggatttcgtccccgcaaatcgatgacggcagccgcggtttcagcttccgtttcgatgcccctttggatatgcgtatggatacgacgcgcggtatgtctgccgcagagtggatagcggttgcgtcggaacaggatttgcacgaggtaatcaagaattatggtgaagagcggtttagccgccggattgcgcgcgccattgttgcgcaacgggcggaaagtccaatcgatacaacccgcaagctggcgcagatcgtggcacaaaacgtccgtactcgcgagcgggggcaggatcctgcgacgcgcaccttccaggcggtccgcatctttattaaccgcgagcttgaagaagtaggggcagtattgccgcaggtcatgtgtcgtctgaaagagggcggacgtttggcggtcattgctttccattcgttggaagatcgcattgtgaagcagtttgtcaaaaaatattcgcaacacgcgcccctgccgcgctgggcggcggtcagggaagcggatttgcccgagctgcccctgaaaatcgtgggcagggcattaaagccgggtgaggcggaaattgccgccaatccgagggcgagaagtgcggttttgcgtgtggcggagcggactgccggtccgataccggaacaatcacagagaaaaacgtctgaatggcaatgaacaaattgaatttccttctgctgcttgcggtgtgcgtttccgctttttccgttgtgatgcagcaaaaccagtacaggctcaatttcacagctttggataaggcgaaaaaacaggaaatcgccttggagcaggattatgcgcaaatgaggctgcaacaggcgcgtttggcgaaccacgaagcgatcagggcggcggcagaaaaacaaaacctccatccgccggtttcgggcaatacctttatggtggagcatcaaagatagaagcagcctgtgtgccggaatcggattcctgcgtcaggataataataacgagaagtaaaaatgttgattaagagcgaatataagcctcggatgctgcccaaagaagagcaggtcaaaaagccgatgaccagtaacggacggatcagcttcgtcctgatggcaatagcggtcttgtttgccggtctgattgctcgcggactgtatctgcagacggtaacgtataactttttgaaagaacagggcgacaaccggattgtgcggactcaaacattgccggctacacgcggtacggtttcggaccggaacggtgcggttttggcgttgagtgcgccgacggagtccctgtttgccgtgcctaaagagatgaaggaaatgccgtctgccgcacaattggaacgcctgtccgagcttgtcgatgtgccggttgatgttttgaggaacaagctcgaacagaaaggcaagtcgtttatctggattaagcggcagctcgatcccaaggttgccgaagaggtcaaagccttgggtttggaaaactttgtatttgaaaaagaattaaaacgccattacccgatgggcaacctgtttgcacacgtcatcggatttaccgatattgacggcaaaggtcaggaaggtttggaactttcgcttgaagacagcctgcatggcgaagacggcgcggaagtcgttttgcgggaccggcagggcaatattgtggacagcttggactccccgcgcaataaagccccgaaaaacggcaaagacatcatcctttccctcgatcagaggattcagaccttggcctatgaagagttgaacaaggcggtcgaataccatcaggcaaaagccggaacggtggtggttttggatgcccgcacgggggaaatcctcgccttggccaatacgcccgcctacgatcccaacaggcccggccgggcagacagcgaacagcggcgcaaccgtgccgtaaccgatatgatcgaacccggttcggcaatcaaaccgtttgtgattgcgaaggcattggatgcgggcaaaaccgatttgaacgaacggctgaatacgcagccttataaaatcggaccgtctcccgtgcgcgatacccatgtttacccctctttggatgtgcgcggcatcatgcagaaatcgtccaacgtcggcacaagcaaactgtctgcgcgtttcggtgccgaagaaatgtatgacttctatcatgagttgggcatcggtgtgcgtatgcactcgggctttccgggcgaaactgcaggtttgttgagaaattggcgcaggtggcggcctatcgaacaggcgacgatgtctttcggttacggcctgcaattgagcctgctgcaattggcgcgcgcctataccgcactgacgcacgacggcgttttactgccggtcagctttgaaaaacaggcggttgcgccgcaaggcaaacgcatattcaaagaatcgaccgcgcgcgaggtacgcaatctgatggtttccgtaaccgagccgggcggcaccggtacggcgggtgcggtggacggtttcgatgtcggcgcgaaaaccggcacggcgcgcaagttcgtcaacgggcgttatgccgacaacaaacacatcgctacctttatcggttttgcccccgccaaaaatccccgtgtgattgtggcggtaaccattgacgaaccgactgcccacggttattacggcggcgtagtggcagggccgcccttcaaaaaaattatgggcggcagcctgaacatcttgggcatttccccgaccaagccactgaccgccgcagccgtcaaaacaccgtcttaatccgagtatcaacgagattgttttatgttcagcaagttaacccctttggctgaaaccggcatcccgactctgtcgtgtgcaaacgcggcagggcgtttgttgcattcagacagccgccaaatcaaacaaggcgatattttcgttgcctgtccgggcgaatatgccgacggacgcagttatatccccgccgccgttgccaacggcgcggcttttgttttttgggacgacgacggcaaatttgcgtggaatcccgaatggaaagtccccaatcaaggcatcaaagatttgaaacaccgtgccggcatattggcggcgcaagtttacggcaacgtttcagacggcctcaaagtttggggcgtagccggaaccaacggcaaaacctccatcacacaatggctggcgcaagctgccgatttgttgggcgaaaaaaccgccattgtcggcacggtcggcaacggcttttggggtgcattggaagaaaccacgcataccacacccgcccccgtcgatgtccaaaccctgctctaccgtttccgtcaacaaggcgcaacagtcgccgcgatggaagtctccagccacgggcttgaccagtcgcgcgtcaacggcgtgtcattccgcagcgcaatctttaccaacctcacccgcgaccacctcgactaccacggcacgatggaagcctacggtgccatcaagtcgcgcctgttttactggcacggcttgaaacacgcagtcatcaacgtggatgacgaatacggcgcggaactcgtaggtcgtctgaaaaaagactgtcccgatttggccgtttacagctatggtttcagcgaacacgccgacatccgcattaccgactttaccgcctcttcagacggcatagcagccgtattccaaaccccgtggggcgaagggaaatgccgcacgcgcctgctcggacggttcaacgcgcaaaacctcgccgcctgcatcgccttgctgtgcgccaacggctatccgcttgataaggtattggatgtgctggcaaaaatccgtcccgcttcagggcgcatggactgcatcatgaacagcggcaagcccttggtcgttgtcgattatgcccacacgcccgacgcattggaaaaagcactcgccaccttgcaggaaatcaaaccgcagggtgcggctttatggtgcgtattcggttgcggcggcaaccgcgatcgcggcaaacgcccgctgatgggcgcggcagccgtacagggcgcggataaagtcgtcgtcaccagcgacaacccgcgtttggaaaatccgcacgacatcatcaacgacatcctgcctgccgttcccgcgcccgaatgcgtcgaagccgaccgtgccgccgccgtccgttatgcggttgaacaagccgccgcaaacgacatcatcctgattgccggcaaagggcatgaaaactatcaggatgtacaaggcgtgaagcaccgtttttccgatcttgaaatcgtcggacaggctttgttaactcgtaaataatgggatattcggacggcatcgtatgaaacaatccgcccgaataaaaaatatgaatcagacattaaaaaatacattgggcatttgcgcgcttttagccttttgttttggcgcggccatcgcatcaggttatcacttggaatatgaatacggctaccgttattctgccgtgggtgctttggcttcggttgtatttttattattattggcacgcggtttcccgcgcgtttcttcagttgttttactgatttacgtcggcacaaccgccctatatttgccggtcggctggctgtatggtgcgccgtcttatcagatagtcggttcgatattggaaagcaatcctgccgaggcgcgtgaatttgtcggcaatcttcccgggtcgctttattttgtgcaggcattatttttcatttttggcttgacagtttggaaatattgtgtatcgggggggggtatttgctgacgtaaaaaactataaacgccgcagcaaaatatggctgactatattattgactttgattttgtcctgcgcggtgatggataaaatcgccagcgataaagatttgcgagaacctgatgccggcctgttgttgaatattttcgacctgtattacgatttggcttccgcgccggcacaatatgccgccaagcgcgcccacattttggaagcagcaaaaaaagcgtcaacatggcatatccgtcatgttgcgcccaagtataaaaattatgttgtggttatcggtgagagcgcgcgttcggattatatgaatgtttacggtttcccattgcccgatacgccttttttgagtcagaccaaagggctgttgataaacggttaccaatcgaccgcccacgcgacgaatctttcgctgccgcagactttggggctgccgggagaaccgaacaataacatcgtcagcttggcgaagcaggcgggttttcggacggcgtggctgtctaatcaaggaatgttggggcattttgccaacgaaatttccacctatgccctacgcagcgattatccgtggtttacccaaaggggtgattatggcaaaagcgcggggttgagcgaccgccttttgttgccggcgttcaaacgggttttgataggaaatgcaggcacgaagcctcggctgattgtgatgcacctgatgggttcgcacagtgatttttgcacacgtttggataaggatgcgcggcggtttcagtatcaaactgaaaaaatatcctgctatgtttccaccatcgcgcaaaccgataaatttttagaagatacagttaagatattgaatgaaaataaagaaagctggtctttggtttacttttccgaccacggtttgatgcatgtcggtaaaggcggcgagcgaacgttgacacatggtgcgtggaagcgtcaaagctacggcgtgccgctggttaaaatttcgtccgatgacacgcggcgcgaaatgattaaagtgaggcgcagcgcgtttaattttttacgcggattcggcagttggacgggtatcgaaaccgacgagttgcccgatgacggctatgatttttgggggaatgttcccgatgtgcagggcgaaggcaataaccttgcctttatcgacggactgcccgacgaccccgcgccgtggtatgcgggaaaaggcaaatcgactaaaaatacgtctaaaaaatgatacgtacagaaaaaatgccgaatgagaatgggaaaataatctgtgttttaccacagcaaaacaggcgataaaaaaatcagccgctaccgatgtgtccgccgcccgaatattaacgaaagtaaatatgaaaccactggacctaaatttcatctgccaagccctcaagcttccgatgccgtctgaaagcaaacccgtgtcgcgcatcgtaaccgacagccgcgacatccgcgcgggcgatgtgtttttcgcattggcgggcgagcggtttgacgcgcatgattttgttgaagacgtattggctgctggtgcggcggcggttgtggtttcgcgcgaagattgtgctgcaatggatggcgcgttgaaagtcgatgacacgcttgccgcattgcaaacgctggcaaaggcgtggcgtgaaaatgtgaatccgtttgtgttcggcattaccggttcgggcggcaagacgacggtgaaggaaatgctggctgcggtattgcgccgccgtttcggcgatgatgccgtgttggcgacggcaggcaacttcaacaaccatatcggattgccgctgactttgttgaagttaaacgaaaaacaccgctatgccgtgattgaaatgggcatgaaccatttcggcgaactggcggttttaacgcaaatcgccaaaccaaatgccgcattggtcaacaacgccatgcgcgcccatgtcggctgcggtttcgacggagtgggcgatattgccaaagcgaaaagcgagatttaccaaggtttatgttcagacggcattgcactgattcctcaagaagatgccaatatggctgtcttcaaaacggcaacgcttaatttgaatacgcgcactttcggcatcgatagcggcgatgttcacgcggaaaatattgtgctgaaaccgttgtcgtgcgaatttgatttggtgtgcggcgatgagcgcgccgccgtggtgctgcctgttcccggccgccacaatgtccacaacgccgccgctgccgccgcgctggctttggctgcgggtttgagtttgaacgatgtggcggaaggtttgaaaggcttcagcaatatcaaaggccgtctgaacgtcaaatccggaatcaagggcgcaaccctgattgacgatacttataatgcgaaccctgacagcatgaaagctgcgattgacgtgttggcgcgtatgcctgcgccgcgtattttcgtgatgggcgatatgggcgaactgggcgaactgggcgaggacgaagccgccgctatgcacgccgaagtcggcgcgtatgcccgcgaccaaggcatcgaagcggcttattttgtcggcgacaacagcgtcgaagcggcggaaaaatttggcgcggacggtttgtggttcgccgccaaagacccgttgattcaagtgttgcgccacgatttgcccgaacgcgccaccgtgttggtgaaaggttcgcgctttatgcagatggaagaagtggtcgaggcattggaggataagtgaaaatgaaaagccgacgtttttttaaagccttattgctgattgccgcgctggtcggcgcgttttatgccggaatgcggacgcaggcgtatctttatgaagatttatgtttagacttgggcggcggtaaaaatccggggagttacccaatttgcgtgattgagaaagtccctgcacgttaatctgcaaaagccgtccgaaaccttgccgggcggcaagccaacctcaaacgggcgcaggcccgatgtatagtggattaacaaaaatcaggacaaggcgacgaagccgcagacagtacaaatagtacggaaccgattcacttggtgcttcagcaccttagagaatcgttctctttgagctaaggcgaggcaacgccgtactggtttttgttaatccactataacgacaaaacaaaaaaaggaagccccatgtttttatggctcgcacatttcagcaactggttaaccggtctgaatatttttcaatacaccacattccgcgccgtcatggcggcgttgaccgccttagcgttttccctgatgttcggcccgtggacgatacgcaggctgaccgcgctcaaatgcgggcaggcagtgcgtaccgacggtccgcaaacccacctcgtcaaaaacggcacgccgacgatgggcggttcgctgattctgaccgccattaccgtgtccaccctgttgtggggcaactgggcaaacccgtatatctggattctcttgggcgtattgctcgccacgggcgcactcggtttttacgacgactggcgcaaagtcgtctataaagaccccaacggcgtgtccgccaaattcaaaatggtgtggcagtcaagcgttgccattatcgccagtttggcattgttttaccttgccgccaattccgccaacaatattttgattgtcccgttcttcaaacaaatcgccctgccgctgggcgtggtcggctttttggtgttgtcttacctgaccatcgtcggcacatccaatgccgtcaacctcaccgacggcttggacggccttgcgaccttccccgtcgtcctcgttgccgccggcctcgccatcttcgcctatgccagcggccactcacaatttgcccaatacctgcaattaccttacgttgccggcgcaaacgaagtggtgattttctgtaccgccatgtgcggcgcgtgcctcggtttcttgtggtttaacgcctatcccgcgcaagtctttatgggcgatgtcggtgcattggcattgggtgccgcgctcggtaccgtcgccgttatcgtccgccaagagtttgtcctcgtcattatgggcggattatttgtcgtagaagccgtatccgttatgcttcaggttggctggtataagaaaaccaaaaaacgcatcttcctgatggcgcccatccatcaccactacgaacaaaaaggctggaaagaaacccaagtcgtcgtccgcttttggattattaccatcgtcttggtgttgatcggtttgagtaccctcaaaatccgctgaacctatgccgtctgaacatctttcagacggcatttgaacgcgcaataaacctgcggcgacaatccgcccagccctatcgttaacggtggctgaaacccgccttatactaaaacagaagtaaaaccatgaaacagacagtcaaatggcttgccgccgccctgattgccttgggcttgaaccgagcggtgtgggcggatgacgtatcggattttcgggaaaacttgcaggcggcagcacagggaaatgcagcagcccaatacaatttgggcgcaatgtattacaaaggacgcggcgtgcgccgggatgatgctgaagcggtcagatggtatcggcaggcggcggaacaggggttagcccaagcccaatacaatttgggctggatgtatgccaacgggcgcggcgtgcgccaagatgataccgaagcggtcagatggtatcggcaggcggcagcgcagggggttgtccaagcccaatacaatttgggcgtgatatatgccgaaggacgtggagtgcgccaagacgatgtcgaagcggtcagatggtttcggcaggcggcagcgcagggggtagcccaagcccaaaacaatttgggcgtgatgtatgccgaaagacgcggcgtgcgccaagaccgcgcccttgcacaagaatggtttggcaaggcttgtcaaaacggagaccaagacggctgcgacaatgaccaacgcctgaaggcgggttattgaacagctcgcgatgccgtctgaaagcggcttgggcaggggcggacatctcctgctcaatatgatttgttttaggacaaaccaaaatgacttttcaaaacaaaaaaatcctcgtcgccggactcggcggtacgggtatttccatgattgcctacctgcgcaaaaacggcgcggaggttgctgcgtatgatgcggagctgaagccggaacgcgtgtcgcaaatcggtaagatgtttgacgggttggtgttttacacgggccgtctgaaagatgcgctggacaacggtttcgatattctggctctcagtcccggcatcagcgagcggcagccggatattgaggcgttcaagcaaaacggcggacgcgtgttgggcgacatcgaattgctggcggacattgtgaaccgccgggacgacaaggtaattgcgattaccggcagcaacggcaaaaccacggtaacgagcctggtcggctatctctgtatcaagtgcgggctggataccgttatcgcgggcaatatcggcacgccggttttggaggcggaatggcagcgcgaaggcaaaaaggcggacgtgtgggtgttggagctttccagcttccaactggaaaacaccgaaagcctgcgtccgactgcggcgacggtgctgaacatttccgaagaccatctcgaccgctacgacgacttgctcgactatgcgcataccaaagccaagattttccgtggcgacggcgtgcaggttttgaatgcggacgatgcgttctgccgcgcgatgaagcgtgccgggcgcgaggtaaaatggttttcgttggaacacgaagctgatttctggttggaacgcgagacaggccgcctgaaacaaggcaatgaagatttgattgtcacgcaagacattccgttgcaaggtctgcacaacgccgctaacgtcatggctgccgtggctttgtgtgaggccatcggtttgtcgcgcgaagcattgctcgaacacgtcaaaaccttccaaggcctgccgcaccgcgtggaaaaaatcggcgagaaaaacggcgtggtgtttatcgacgacagcaaaggcacgaatgtcggcgcgactgccgccgcgattgccggtttgcaaaatccgctcttcgtgattttgggcggcatgggtaaagggcaggacttcacgcccctgcgcgatgcactggtaggcaaggcaaaaggcgtgttcttgattggtgtcgatgcgccgcaaatccgccgcgatttggacggctgcggcttgaatatgaccgactgcgccactttgggagaagccgttcagacggcatatgcccaagccgaagcaggcgatattgtgttgctcagccccgcctgcgcgagctttgatatgttcaaaggctacgcgcaccgttcggaagtgtttatcgaagcgtttaaggctttgtgatgccgtctgaaatgcaaacgccgtcattgttgggcggcaagtaaagatttagaataccgatttgggatgtatcgtatgttcggacggcattgtctgccgtctgaaatttttgccctttgcggcaggtgcaaacagactggcaggtggtttttttgaagatttcggaagtattggtaaaagtgggcgacggtgtccacactctgctgctcgacaggccgattgtgcgcgacggcaggaaattcgacgcgccgcttttgtggatggtggtgctgatgacggcgttcagcctgctgatgatttattcggcttctgtgtatttggcatcaaaagaaggcggcgatcagtttttctatttgaccagacaggcggggttcgtcgttgccggcttgatagcgagcggtttgttatggtttctttgcaggatgaggacatggcggcggcttgtgccgtggatttttgccctatccggcctgttgctggtagtcgtattgattgccgggcgcgaaatcaatggcgcgacccgttggatacctttgggtccgttgaatttccagccgaccgagctgttcaagctggcggtcatcctttatttggcaagcctgttcacgcgccgtgaagaagtgttgcgcagcatggaaagtttgggttggcagtcgatttggcgggggacggccaatctgatcatgtccgccaccaatccgcaggcacgtcgtgaaacattagaaatgtacggccgtttccgggcgatcatcctgccgattatgctggtggcgttcggtttggtgctgataatggtacagccggatttcggttcgtttgtcgtcattaccgtcattgccgttggaatgctgtttttggcaggattgccgtggaaatattttttcgtcctggtaggcagcgtcttgggcgggatggtgctgatgattaccgccgctccctaccgtgtgcagcgggtagtggcatttttggacccgtggaaagacccgcagggtgccggctaccagcttacccactctctgatggcaatcgggcgcggagagtggttcggtatgggtttgggtgcgagtttgagcaaacgcggctttctgccggaagcgcataccgattttatttttgccatcatcgccgaagaattcggtttcttcggtatgtgcgtgctgatattctgttacggctggctggtggtgcgggcgttttccatcggcaagcagtcgcgcgatttgggtttgactttcaacgcctatatcgcttcgggtatcggcatttggatcggtatccaaagtttcttcaatatcggtgtgaacatcggtgctttgccgaccaaaggtctgacgctgccgttgatgtcctatggcggttcgtcagtctttttcatgctgatcagcatgatgctgctgttgcgtatagattatgaaaaccgccggaaaatgcgcggttatcgggtggagtaaatcatgggcggtaaaacctttatgctgatggcgggcggaacgggcggacatattttccccgcgctggcggtggcggattcattgcgcgcgcgcggccatcatgtgatttggctgggcagcaaggattcgatggaagagcgtatcgtgccgcaatacggcatacgcttggaaacgctggcgattaaaggcgtgcgcggcaacggcatcaaacgcaaactgatgctgccggttactttgtatcaaaccgtccgcgaagcgcagcggattatccgcaaacaccgtgtcgagtgcgtcatcggcttcggcggcttcgttaccttccccggcggtttggcggcgaagctattaggcgtgccgattgtgattcacgagcaaaacgccgtggcaggtttgtccaaccgccacctgtcgcgctgggcgaagcgggtgttgtacgcttttccgaaagcgttcagccacgaaggcggcttggtcggcaaccccgtccgcgccgatattagcaacctgcccgtgcctgccgaacgcttccaagggcgtgaaggccgtctgaaaattttggtggtcggcggcagtttgggcgcggacgttttgaacaaaaccgtaccgcaggcattggctttgctgcccgacaatgcgcgtccgcagatgtaccaccaatcgggacggggcaagctgggcagcttgcaggcggattacgacgcgctgggcgtgaaagccgaatgcgtggaatttattaccgacatggtgtccgcctaccgcgatgccgatttggtgatttgccgtgccggcgcgctgacgattgccgagttgacggcggcgggattgggtgcgttgttagtgccgtatcctcacgcggttgacgatcaccaaaccgccaacgcgcgttttatggtgcaggcggaggcgggattgctgttgccgcaaacccagttgacggcggaaaaactcgccgagattctcggcggcttaaaccgcgaaaaatgcctcaaatgggcagaaaacgcccgtacgttggcactgccgcacagtgcggacgacgtggcggaagccgcgattgcgtgtgcggcgtaaactgccgaaccatgccgtctgaaaagccgttcagacggcatggatgttttttatttcaatccgctatatatttgtcagaaaactatggcgcgcaaacggtcagccctttaaaataacgcctttacgcatcgaaaatccaccggaacgcaacattatgatgaaaaatcgagttaccaacatccattttgtcggtatcggcggcgtcggcatgagcggcatcgccgaagtcttgcacaatttgggctttaaagtttccggttcggatcaggcgcgaaatgccgctaccgagcatttgggcagcctgggcattcaagtttatcccggccataccgccgaacacgttaacggtgcggatgtcgtcgttacctctaccgccgtcaaaaaagaaaatcccgaagttgtcgctgcgttggagcagcaaattcccgttattccgcgcgccctgatgttggcggagttgatgcgcttccgtgacggcatcgccattgccggcacgcacggcaaaaccacgaccaccagcctgaccgcctccatcctcggcgcggcaggacttgacccgactttcgttatcggcggcaaactcaacgccgcaggcactaacgcccgcttgggcaaaggcgaatacatcgttgccgaagccgacgagtcggatgcatcctttctgcacctgacaccgattatgtccgtcgttaccaatatcgacgaagaccatatggatacctacgggcacagcgtcgaaaaactgcatcaggcgtttatcgatttcatccaccgtatgcccttctacggcaaagcctttttgtgtattgacagcgaacacgtccgcgcgattttgcccaaagtgagcaaaccttatgctacttacggtttggacgataccgccgacatctacgccaccgacatcgaaaacgtcggcgcgcaaatgaaattcaccgtccatgttcaaatgaaaggacatgagcaggggtcgtttgaagtcgtgctgaatatgcccggcagacacaacgtgctgaacgcattggcagccatcggcgtggcgctggaagtcggcgcatcggttgaagcgatccaaaaaggcttgctcggctttgaaggcgtcggccgccgcttccaaaaatacggcgacatcaagttgccaaacggcgggaccgcgctcttggtggacgactacggacaccaccccgtcgaaatggcggcgacccttgccgccgcacgcggcgcgtatctggaaaaacgtttggtactcgccttccagccgcaccgctatacccgcacgcgcgatttgtttgaagactttaccaaagtcctcaataccgttgacgcgctggtgctgaccgaagtttatgccgccggtgaagagccgattgccgccgccgattcccgcgctcttgcccgcgccatccgcgtgttgggcaaactcgagccgatttactgcgaaaacgttgccgatctgcccgaaatgctgttgaacgttttgcaggacggcgacatcgtgttgaatatgggcgcgggaagcatcaaccgcgtccccgccgcgctgctggcattgtcgaaacagatttgaggcacacccgcctgacagacggaacatcatataaagatcgtctgaaaccgcaaatcaggtttcagacgacctctggcaacaagcataaagcaatcaggaaagaacaaaaacaatgcagaattttggcaaagtggccgtattgatgggcggtttttccagcgaacgagaaatctcgctggacagcggcaccgccattttgaatgctttaaaaagcaaaggcatagacgcatacgccttcgatcctaaagaaaccccattgtctgaattgaaggcacaaggttttcagacggcattcaacatccttcacggtacttacggcgaagacggggcggttcagggtgcattggaactgttgggcattccctataccggcagcggtgtcgccgcatccgccatcggcatggacaaataccgctgcaaactgatttggcaggcattgggattgcccgttcccgagttcgccgtcctgcacgacgacactgatttcgatgccgtcgaagaaaaattgggcctgccgatgtttgtgaaaccggcggccgaaggcagcagcgtaggcgtggtaaaagtcaaaggaaaaggccgtctgaaaagcgtttacgaagaattgaaacaccttcagggcgaaatcattgccgaacgttttatcggcggcggcgaatattcctgccccgtcctgaacggcaaagggctgcccggcatacacatcattcccgcaaccgagttttacgactacgaagccaagtacaaccgcgacgacaccatttatcaatgtccttcggaagatttgaccgaagccgaagaaagcctgatgcgcgaactggcggttcgcggcgcgcaggcaatcggtgcggaaggctgcgtgcgcgtcgatttcctcaaagataccgacggcaaactctatctgttggaaatcaacaccctgcccggtatgacgagccatagtttagtaccgaaatccgctgccgttacgggcgtgggttttgccgatttatgtattgaaattttgaagaccgcacatgtgggataatgccgaagcgatggaacggctgacgcgctggctgcttgtcatgatggcgatgctgcttgctgcgtccgggctggtttggttttacaattcgaatcatctgcccgtcaagcaggtgtcgctgaagggcaacctggtttattccgataagaagacattgggcagtttggcgaaagaatacatccatgggaatattttgaggacggacatcaatggcgcacaggaggcctaccgccggtatccgtggattgcgtcggtcatggtgcgccgccgttttcccgacacggttgaggtcgtcctgaccgagcgcaagccggtcgcgcgttggggcgaccatgccttggtggacggcgaaggcaatgtttttgaagcccgcttggacagacccggaatgccggtattcagaggcgcggaaggaacgtctgccgaaatgctccgccgttatgacgaattttcgactgttttggcaaaacagggtttgggcatcaaagagatgacctatacggcacgttcggcgtggattgtcgttttggacaacggcatcaccgtcaggctcggacgggaaaacgagatgaaacgcctccggctttttaccgaagcgtggcagcatctgttgcgtaaaaataaaaatcggttatcctatgtggatatgaggtataaggacggattttcagtccgctatgcttccgacggtttacccgaaaaagaatccgaagaatagtgggaacaggtatcggacagattacggccgtgccgtctgaaacggtgcgacgcaaatttcaatcagttttaagagcagacgaacaatggaacagcagcaaagatacatcagcgtactggatatcggtacgtctaaagtcctcgcactgatcggggaagttcaagatgacgacaaaatcaacatcgtcggtttggggcaggctccttcacggggcttgcgcgcgggcatggtaaccaatatcgatgccaccgtccaagccatcaggcaggcggtcaatgatgccgagctgatggcggataccaaaattactcacgttaccacaggtatcgcaggcaaccacatccgcagtctcaattcgcaaggtgtggttaaaattaaagatggggaagtcacgcaggcagacatcgatcgcgccattgaaacggcaaaggcaatcaatatcccgcccgatcaaaaaattctcgatgccgtggttcaagactacattattgacacccaacttggcgtgagggagcccatcggtatgagcggtgtgcgtctggatacgcgggtgcacatcattaccggtgcaagtacggcagtgcagaatgtccaaaaatgtatcgagcggtgcggtttgaaaagcgatcagatcatgcttcagccgttggcaagcgggcaggcggtgctgactgaagatgaaaaagacctcggcgtatgcgtcatcgacattggtggcggaacgaccgatattgccgtttatatgaacggtgccatccgccatacgtccgtcattccggccggtggtaatctgattaccaaagatttgtccaaatcgttgagaacacctctcgatgccgccgagtacattaaaatccattatggcgtggcatcatgcgatacggaaggcttgggtgagatgattgaagttccgggcgtgggtgaccggacatcgcgtcaggtttccagtaaggttctggcagcaatcatcagtgcacggattcaggagatttttggcgtagtgctgggcgagctgcaaaaatcgggtttccccaaagaagtgctgaatgcgggtatcgttctgaccggcggtgtgtccatgatgaccgggattgtggaatttgccgaaaaaatcttcgatttgcctgtacgcaccggtgcaccccaagaaatgggcggtttgtccgaccgcgtccgcacaccgcgtttttctaccgctatcgggctgcttcatgcagcatgcaagctggaaggaaacttgccgcagccggaaaacggtgcagtgcaagagagggaagggggcggcggtttgttggcaagattgaaacggtggattgaaaacagcttctgaacaggtggattgccgtttgacaggtgagaagtattttgccagcagcaagatacttcttatataatgaataataatttatttaaaccgtcctctgaatggggcgagcaggagtttttgaatggaatttgtttacgacgtggcagaatcggcagtcagccctgcggtgattaaagtaatcggcttgggcggcggcggttgcaatgcaatcaataacatggttgccaacaatgtgcgcggtgtggagtttatcagtgccaatacggatgcgcagtctctggcaaaaaaccatgcggcgaagagaatccagttgggtacgaatctgacacgcggtttgggcgcgggcgcgaatcccgatatcggccgtgcggcagcccaggaagaccgggaagccattgaagaagccattcgcggtgcgaatatgctgtttatcacgaccggtatgggcggcggtaccggtaccggttccgcgccggttgttgctgagattgccaagtctttgggcattctgaccgttgccgtggttacccgaccgttcgcatatgaaggtaagcgcgtccatgtcgcacaggcagggttggaacagttgaaagaacacgtcgattcgctgattatcatcccgaacgacaaactgatgactgcattgggtgaagacgtaacgatgcgcgaagccttccgtgccgccgacaatgtattgcgcgatgcggtcgcaggcatttccgaagtggtaacttgcccgagcgaaatcatcaacctcgactttgccgacgtgaaaaccgtgatgagcaaccgcggtatcgctatgatgggttcgggttatgcccaaggtatcgaccgtgcgcgtatggcgaccgaccaggccatttccagtccgctgctggacgatgtaaccttggacggagcgcgcggtgtgctggtcaatattacgactgctccgggttgcttgaaaatgtccgagttgtccgaagtcatgaaaatcgtcaaccaaagcgcgcatcccgatttggaatgcaaattcggtgcggctgaagacgagaccatgagcgaagatgccatccggattaccattatcgctaccggtctgaaagaaaaaggcgcggtcgattttgttccggcaagggaggtagaagcggttgctccgtccaaacaggagcaaagccacaatgtcgaaggtatgatccgcaccaatcgcggtatccgcacgatgaaccttaccgctgcggatttcgacaatcagtccgtacttgacgactttgaaatccctgcgattttgcgtcgtcaacacaattcagacaaataatgtgctgtttgcccgtaaacctgctgcctcccgaatcggtttgtccggtttgggaggtatgtttttcaagatgttgcaatttcgtacggtttgcggtcggcggattcagatttttccacttgatacagactttcagatatggacacttcaaaacaaacactgttggacgggatttttaagctgaaggcaaacggtacgacggtgcgtaccgagttgatggcgggtttgacaacttttttgacgatgtgctacatcgttatcgtcaaccctctgattttgggcgagaccggcatggatatgggggcggtattcgtcgctacctgtatcgcgtctgccatcggctgttttgttatgggttttgtcggcaactatccgattgcactcgcaccggggatggggctgaatgcctatttcacctttgccgtcgttaagggtatgggcgtgccttggcaggttgcgttgggtgcggtgttcatctccggtctgatttttatcctgttcagcttttttaaagtcagggaaatgctggtcaacgcactgcctatgggtttgaaaatgtcgattgctgccggtatcggtttgtttttggcactgatttccctgaaaggcgcaggcattatcgttgccaatccggcaaccttggtcggtttgggcgatattcatcagccgtccgcgttgttggcattgttcggttttgctatggtggtcgtattgggacatttccgcgttcaaggcgcaatcatcatcaccatcttgaccattaccgtcattgccagcctgatgggtttgaatgaatttcacggcatcatcggcgaagtaccgagcattgcgccgacttttatgcagatggattttgaaggcctgtttaccgtcagcatggtcagtgtgattttcgtcttcttcttggtcgatctatttgacagtaccggaacgctggtcggcatatcccaccgtgccgggctgctggtggacggtaagctgccccgcctgaaacgcgcactgcttgcagactctaccgccattgtggcaggtgcggctttgggtacttcttccaccacgccttatgtggaaagcgcggcgggcgtatcggcaggcggacggaccggcctgacggcggttaccgtcggcgtattgatgctcgcctgcctgatgttttcacctttggcgaaaagtgttcccgcttttgccaccgcgcccgccctgctttatgtcggcacgcagatgctccgcagtgcgagggatattgattgggacgatatgacggaagccgcacctgcgttcctgaccattgttttcatgccgtttacttattcgattgcagacggcatcgctttcggcttcatcagttatgccgtggttaaacttttatgccgccgcaccaaagacgttccgcctatggtatggattgttgccgtattgtgggcactgaaattctggtatttgggctgattgattcgatattaaaaatgccgtctgaaaggttttcagacggcattttgtttgccgatatatttaatttttattaaattatataaaaatcaaatacataataaaatacatcggattgcttaaaaataatacattgtttttatgtataaaatattttataagttttcaggattttgattatcaaaaatttttcttgatttcctgacaattttattgaaacaaataattcaaaattaatctagtttaatcatggaattaaaataaaatattaaaattatgtaatgagtctccttaaaaatgtttgacattttcagtcttgtgttttagattatcgaaaaataaaactacataacactacaaaggaacattactatgaaaccaattcagatgttttccccttttctgaataatccccttgttttcttcttgtctgcggttttgccgcataattccgaacggtctgctgtttttctttgattcgttttaaatatcaataagataatttttcccatatatttttaatgattggattgggatgcccgacgcgtcggatggctgtgttttgccgtccgaatgtgatggaagcctgtccatactgaaaaaaagtctataaaggagaaatatgatgagtcaacactctgccggagcacgtttccgccaagccgtgaaagaatcgaatccgcttgccgtcgccggttgcgtcaatgcttattttgcacgattggccacccaaagcggtttcaaagccatctatctgtccggcggcggcgtggcagcctgttcttgcggtatccctgatttgggcattaccacaatggaagatgtgctgatcgacgcacgacgcattacggacaacgtggatacgcctctgctggtggacatcgatgtgggttggggcggtgcattcaatattgcccgtaccattcgcaactttgaacgcgccggtgttgcagcggttcacatcgaagatcaggtagcgcaaaaacgctgcggccaccgtccgaacaaagccattgtatctaaagatgaaatggtcgaccgtatcaaagctgccgtagatgcgcgcgttgatgagaacttcgtgattatggcgcgtaccgatgcgctggcggtagaaggtttggatgccgctatcgaacgcgcccaagcttgtgtcgaagccggtgcggacatgattttccctgaagccatgaccgatttgaacatgtaccgccaatttgcagatgcggtgaaagtgcccgtgttggcgaacattaccgagtttggttccactccgctttatacccaaagcgagctggctgaaaacggcgtgtcgctggtgctgtatccgctgtcatcgttccgtgcagcaagcaaagccgctctgaatgtttacgaagcgattatgcgcgatggcactcaggcggcggtggtggacagtatgcaaacccgtgccgagctgtacgagcatctgaactatcatgccttcgagcaaaaactggataaattgtttcaaaaatgatttaccgctttcagactgcctttcaacaaatccgcatcggtcgtctgaaaacccgaaacccataaaaacacaaaggagaaataccatgactgaaactactcaaaccccgaccctcaaacctaaaaaatccgttgcgctttctggcgttgcggccggtaataccgctttgtgtaccgttggccgtaccggcaacgatttgagctatcgcggttacgacattctggatttggcacaaaaatgcgagtttgaagaagtcgcccacctgctgattcacggccatctgcccaacaaattcgagctggccgcttataaaaccaagctcaaatccatgcgcggcctgcctatccgtgtgattaaagttttggaaagcctgcctgcacatacccatccgatggacgtaatgcgtaccggcgtatccatgctgggctgcgttcatcctgaacgtgaaagccatccggaaagtgaagcgcgcgacatcgccgacaaactgatcgccagcctcggcagcatcctcttgtactggtatcaatattcgcacaacggcaaacgcattgaggttgaaagcgacgaagagaccatcggcggtcatttcctgcaactgttgcacggcaaacgcccaagcgaatcacacatcaaagccatgcacgtttcactgattctgtatgccgaacacgagttcaacgcttctacctttaccgcccgcgtgatcgccggtacaggctctgatatgtactccagcattaccggagcaatcggcgcgttgaaaggtccgaaacacggcggcgcgaacgaagtggcttacgatattcaaaaacgctaccgcaatgccgacgaagctgaagccgacatccgcgaacgcatcggccgcaaagaaatcgtgatcggtttcggtcatccggtgtacaccatttccgaccctcgcaacgttgtcattaaagaagtggcacgcggtttgagcaaagaaaccggcgatatgcgcctctttgacattgccgaacgtttggaaagcgtgatgtgggaagagaaaaaaatgttcccgaatctggactggttctctgccgtttcctaccaaaaattgggcgtaccgaccgctatgttcacaccgctgttcgtaatttcccgtacaaccggttggagcgcacacgttcttgagcaacgcaaagacggcaaaatcatccgtccgagcgcaaactacacaggccctgaagatttggcgtttgtggagattgaagaacgataattgaagaatgcaatagcagtttgttctttaatttcggtatgcaaagctaaggatttcagacgaccttgccttattggaaaggttgtctgaaataagtttaatctaataggagaagataatcctgtattggcgcaagtaacaggataagaaacatggaagatttatatataatactcgctttgggtttggttgcgatgattgccggatttatcgatgcgattgcgggcgggggtggtttgattacgctgcccgcactcttgttggcaggtattcctcccgtgtcggcaattgccaccaacaagctgcaagcagccgctgctacgttttcagctacggtttcttttgcacgcaaaggtttgattgattggaagaaaggtctcccgattgccgcagcatcgtttgtaggcggcgtggccggtgcattatcggtcagcttggtttccaaagatattctgctggcggtcgtgccggttttgttgatatttgtcgcactgtattttgtgttttcgcccaagctcgacggcagtaaggaaggcaaagccagaatgtctttttttctgttcgggctgacggtcgcaccgcttttgggtttttacgacggtgtgttcggaccgggtgtcggctcgttttttctgattgcctttattgttttgctcggctgcaagctgttgaacgcgatgtcttacaccaaattggcgaacgttgcctgcaatcttggttcgctatcggtattcctgctgcacggttcgattattttcccgattgcggcaacgatggcggtcggtgcgtttgtcggtgcgaatttaggtgcgagatttgccgtccgcttcggttcgaagctgattaagccgctgctgattgtcatcagcatttcgatggctgtgaaattgttgatagacgagagaaatccgctgtatcagatgattgtttcgatgttttaaaccctttcagacgaccccttcaaaacgtcggctgaaacctcaaaccacaagaaaaacagatccacaggagaaccgacatggctgccaaccaacgttaccgcaaaccgctgcccggtacggatttggaatactacgacgcgcgtgcggcgtgtgaggacatcaagcccggctcttacgacaagctgccttacacgagccgcattttggcggagaatttggtcaaccgcgcggacaaagtcgatttgccgacgctgcaaagctggctggggcagttgatagaagggaagcaggaaatcgactttccgtggtatccggcgcgggtggtgtgccacgatattctggggcagaccgcgttggtggatttggcaggcctgcgcgatgcgattgccgaaaaaggcggcgatcctgccaaagtgaatccggtggtgcaaacccagctcatcgtcgaccactctctggcggtggagtgcggcggttacgatcctgatgccttccgcaaaaaccgcgaaatcgaagaccgccgtaacgaagaccgtttccacttcatcaactggacaaaaaccgcgtttgaaaatgtggacgtgattccggcgggcaacggcatcatgcaccaaatcaatctagaaaaaatgtcgcccgtcgtccaagtcaaaaacggcgtggctttccccgatacctgcgtcggtactgactcacatacgccgcacgtcgattcattgggcgtgatttccgtgggcgtgggcggattggaagcggaaaccgtaatgctgggacgcgcgtccatgatgcgcctgcccgatattgtcggcgttgagctgaacggcaaacggcaggcgggcattacggcgacggatattgtgttggcactgaccgagtttctgcgcaaagaacgcgtggtcggggcgtttgtcgaattcttcggcgagggcgcgagaagcctgtctatcggcgaccgcgcgaccatttccaacatgacgccggagttcggcgcgactgccgcgatgttcgctattgatgagcaaaccattgattatttgaaactgaccggacgcgacgacgcgcaggtgaaattggtggaaacctacgccaaaaccgcaggcttgtgggcagatgccttgaaaaccgccgtttatcctcgcgttttgaaatttgatttgagcagcgtaacgcgcaatatggcaggcccaagtaacccgcatgcccgttttgcgaccgccgatttggcggcgaaagggctggcgaagccttacgaagagccttcggacggccaaatgcccgacggctcggtcatcatcgccgcgattaccagttgcaccaacacttccaacccgcgcaacgttgttgccgccgcgctcttggcacgcaatgccaaccgtctcggcttgaaacgcaaaccttgggtgaaatcttcgtttgccccgggttcaaaagtagccgaaatctatttgaaagaagcgggcctgttgcccgaaatggaaaaactcggcttcggtatcgtcgccttcgcctgcaccacctgcaacggcatgagtggcgcgctggatccgaaaatccagaaagaaatcatcgaccgcgatttgtacgccaccgccgtattatcaggcaaccgcaacttcgacggccgtatccacccgtatgcgaaacaggctttcctcgcttcgcctccgttggtcgttgcctacgcgctggcaggcagtatccgtttcgatattgaaaacgacgtactcggcgttgcagacggcaaggaaatccgcctgaaagacatttggcctgccgatgaagaaatcgatgccgtcgttgccgaatatgtgaaaccgcagcagttccgcgatgtgtatgtaccgatgttcgacaccggcacagcgcaaaaagcacccagtccgctgtacgattggcgtccgatgtccacctacatccgccgtccgccttactgggaaggcgcgctggcaggggaacgcacattaagaggtatgcgtccgctggcgattttgcccgacaacatcaccaccgaccacctctcgccgtccaatgcgattttggccgtcagtgccgcaggcgagtatttggcgaaaatgggtttgcctgaagaagacttcaactcttacgcaacccaccgcggcgaccacttgaccgcccaacgcgctaccttcgccaatccgaaactgtttaacgaaatggtgaaaaacgaagacggcagcgtgcgccaaggctcgttcgcccgcgtcgaacccgaaggcgaaaccatgcgcatgtgggaagccatcgaaacctatatgaaccgcaaacagccgctcatcatcattgccggtgcggactatggtcaaggctcaagccgcgactgggctgcaaaaggcgtacgcctcgccggcgtagaagcgattgttgccgaaggcttcgagcgtatccaccgcaccaaccttatcggcatgggcgtgttgccgctgcagttcaaacccgacaccaaccgccataccctgcaactggacggtacggaaacctacgacgtggtcggcgaacgcacaccgcgctgcgacctgaccctcgtgattcaccgtaaaaacggcgaaaccgttgaagttcccgttacctgctgcctcgatactgcagaagaagtattggtatatgaagccggcggcgtgttgcaacggtttgcacaggattttttggaagggaacgcggcttagaggtcgtctgaaaagcaagacgtagcgtgggtcgggttcaacattttgctcattcacgtaattctcgatatggcaggcatctactgtaaatcgtcattcccgcgcaggcgggaatccagaaagtggaattgaggaaaccttatttatccgatgagtttctgtgcggacaaatttggattcccgcctgcgcgggaatgacggggtttaataatctgccgtatcacaacacagtagccgtagattgtggcgaaccccgacagtttgcggaatcaaacggctttgtcggagtggcagcctaatgtacttctggaaagtgggtgtagcgtgggctttgcccgcgaaataaaggctgaattgacatggtatagaggattaacaaaaatcgggacaaggcggcgaagccgcagacagtacagatagtacggaaccgattcacttggtgcttgagcaccttagagaatcgttctctttgagctaaggcgaggcaacgctgtactggtttttgttaatccactataaatttaatccactatactgtaaatcgtcattcccgcgcaggcgggaatccagaaagtggaattgaggaaacctttttatccgatgagtttctgtgcggataaatctggattcccgcctgcgcgggaatgacggggtttaataatctgccgtatcacaacacagtagccgtagattggggcgaaccccgacagtttgcggaatcaaacggctttggtcggagtggcagcctaatccactataaaaatcgtgggcagagcccacgctacataaggagaatctagaaatgccgcaaattaaaattcccgccgtttactaccgtggcggtacatcaaaaggcgtgtttttcaaacgttccgacctgcccgaggcggcgcgggaagcgggaagcgcacgcgacaaaatcctcttgcgcgtactcggcagcccggatccctacggcaagcagatagacggtttgggcaacgccagctcgtccaccagcaaggcggtgattttggacaagtccgaacgcgccgatcacgatgtcgattaccttttcgggcaagtttccatcgacaaaccttttgtcgattggagcggcaactgcggcaacctcaccgctgccgtgggcgcattctccatcgaacagggcttggtcgataaaggcaagattccttcagacggcatctgcacggtcaaaatctggcagaaaaacatcggcaaaaccattattgcccatgtaccgatgcaaaacggcgcagttttggaaacaggcgattttgagctcgacggcgtaacgttcccggcagccgaagtacaaatcgaatttcttgatccagccgacggcgaaggcagtatgttcccaaccggcaatttggtcgatgaaattgatgtgccgaatataggccgtttgaaagccacgctcatcaacgcgggcattccgaccgttttcttgaatgccgccgacttgggctacacaggcaaagagttgcaagacgacatcaacaacgatgccgcggctttggaaaaattcgagaaaatccgcgcttacggtgcgctgaaaatgggtctgatcagcgacgtatccgaagctgccgctcgcgcgcacacgccgaaagtcgccttcgtcgcgcccgccgccgattacaccgcctccagtggcaaaaccgtgaacgccgccgacatcgatttgctggtacgcgccctgagcatgggcaaactgcaccacgcgatgatgggtaccgcctctgttgccattgcgaccgccgccgccgtacccggtacgctggtcaaccttgccgcaggcggcggaacgcgtaaagaagtgcgcttcgggcatccttccggcacattgcgcgtcggtgcagccgccgaatgtcaggacggacaatggacggccaccaaagcggtcatgagccgtagcgcacgcgtgatgatggaaggttgggtcagggtgcctgaggattgtttttaaattgacgtagcatgggtttgcccgcgagccataaaaaggtcgtctgaaaaacaagtaaacatcaaatcactgaccattcctttcccttgccctgtggcggaaggcggcaaatcacaaggaagaacacggaaaccccgataaaagacagcttcccgtattaccgtcattcccgcgcaggcgggaatccagacctgtcaatatggaggattggcaggggaaaacaggtttcgtgagttctacattctggattcccgccacagcctgtcctcgcgtaggcggggacggaataacgatagaaaatgcggcatacgctttgcccaaagaggccgtctgaaacaccttgcgcctgatgtctgcctttttcagacgaccccacaccaaaaaaacaaccacaaactacaaggagaaacatcatgtccgaccaactcatcctcgttctgaactgcggcagttcatcgctcaaaggcgccgttatcgaccgaaaaagcggcagcgtcgtcctaagctgcctcggcgaacgcctgaccacgcccgaagccgtcattacgttcaacaaagacggcaacaaacgccaagttcccctgagcggccgaaattgccacgccggcgcggtgggtatgcttttgaacgaactggaaaaacacggtctgcacgaccgcatcaaagccatcggccaccgcatcgcccacggcggcgaaaaatacagcgagtctgttttgatcgaccaggccgtaatggacgaactcaatgcctgcattccgcttgcgccgctgcacaaccccgccaacatcagcggcatccttgccgcacaggaacatttccccggtctgcccaatgtcggcgtgatggatacttcgttccaccaaaccatgccggagcgtgcctacacttatgccgtgccgcgcgagttgcgtaaaaaatacgctttccgccgctacggtttccacggcaccagtatgcgttacgttgcccctgaagccgcacgcatcttgggcaaacctctggaagacatccgcatgattattgcccacttaggcaacggcgcatccattaccgccatcaaaaacggcaaatccgtcgataccagtatgggtttcacgccgatcgaaggtttggtaatgggtacacgttgcggcgacatcgatccgggcgtatacagctatctgacttcccacgccgggatggatgttgcccaagtggatgaaatgctgaacaaaaaatcaggtttgctcggtatttccgaactttccaacgactgccgcaccctcgaaatcgccgccgacgaaggccacgaaggcgcgcgcctcgccctcgaagtcatgacctaccgcctcgccaaatacatcgcttcgatggctgtgggctgcggcggcgttgacgcactcgtgttcaccggcggtatcggcgaaaactcgcgtaatatccgtgccaaaaccgtttcctatcttgatttcttgggtctgcacatcgacaccaaagccaatatggaaaaacgctacggcaattcgggcattatcagcccgaccgattcttctccggctgttttggttgtcccgaccaatgaagaactgatgattgcctgcgacactgccgaacttgccggcatcttgtagccaaaaaagggacgagtccgcaaaaatgccgtctgaaaccccaaacgcccgattaggctgatgaggattttagacggcattgttcatttttttgttatcttgcatttttgtgcggacggtggaatttcatcctgtaaacataaatatttgtcggaaaacagaaaccctccgccgccatttctacgaaagcaggaaaccagcaacgcaaagcgacagggatttgttggaaatgaccgaaaccgaacgaaccggattcccgcctgcgcgggaatgacgggattttctgtttttgtggaaatgacgggattttgaatttcgggcgtacaatacggaaaacatgacgataaggaaacaaaccatggcacagtttttcgctattcatcccgacaatccccaagaacgcctcatcaagcaggcggttgaaatcgtcaataaaggcggcgtggtcgtttatccgaccgattcctgttatgccttgggctgcaaactcggcgataaggcggcgatggaacgcatactctccatccgcaaaatcgatttgaaacaccacctgaccctgatgtgcgcagatttgagcgagttgggcacatacgccaaagtcgacaacgtacagtttcgtcagcttaaagccgccacacccgggccttatacttttattttacaggcgacgaaggatgtgccggcgcgcacgctgcacccgaaacgcaaaaccatcgggctgcgtattcccgataatgccattgcacaagccctgctgggggaattgggcgagccgcttttaagctgcaccctgatgctgcccgaagacggcgaaccattgaccgatccttatgaaatccgcgagcgtttggaacacgccgtcgatttggtgattgacggcggctggtgcggaaccgagccgaccaccgtcgtcgatatgaccgacggcacggaattggtgcgccaaggttgcggcgatacggcggtgttcggtttgtagggaaaccgatgccgtctgaagcatcggctgttcagacggcattgcgcgccttgccggcggcagtccgaaatgccggcgcgtatcgcgctcggtcggaatatccgtttgaaacggcattttgatgcattactgcaccgcaatcggaattctcggttcgtagagcaggtcgtaggtcggcttgttgagcaggtcttggagcgtgaaaccgtccagatacgtgaaaaacgacttcatcgcgccgccgagtatgcccgtcagccggcaggacggtgtaatcaggcattcgttgttctcgcccatgcactcgaccagctgcatcggttcgaggtggcggacaaccgagccgatgttgatgcggtcgggcggtgcggcaagccgcagaccgccgccttttccgcgcacactgtggaggaagccgcctttgaccagcgcggtaacgaccttcatcagatggcttttggaaatgccgtaggttacggcgatggtactgatgttgaccagcgcatcgtcgttgatggcagtgtagataaggacgcgcagcccgtagtccgtatgttgtgtcaaatacatgattttctcggtatggattgttattcttatcggtacggtttaaggttcacggacaataccttaatggttgaaaccctgtccgtcggggcggtagaatgcagcctgtctgcggcggtatgccgtctgaaacatccgcgctaccgtttgagaatttgttattgtaactcaaaatcatgaaaccgttgaaacgacatcccgcccttatcgggctttcgcgtgaccaccaccattcgctttccctgtgcgtgcgtctgttgcggacgccggaagaaaggcatcgggacgaactcgaaccgcatttttccgaattggaaacccattttcgcgaagaagaaaccaagtttgccccaatttggcagaatgtcgcccccgaattgaaacaacgtttcgagaaagaccacgcccgactgcggcagatgatggcaagccccgaatacggtaacgcggcgtggaataccgcttttgccacaaccctgcgcgaccacgcgcgctttgaagaacgcgagctgtttcccgccgccgaaccgtttttgccggcatgattccgttttgcggtaaatatattaatgataaacaaggaacacacatgaaatttaccaagcaccccgtctgggcaatggcgttccgcccattttattcgctggcggctctgtacggcgcattgtccgtattgctgtggggtttcggctacacgggaacgcacgagctgtccggtttctattggcacgcgcatgagatgatttggggttatgccggactggtcgtcatcgccttcctgctgaccgccgtcgccacttggacggggcagccgcccacgcggggcggcgttctggtcggcttgactatcttttggctggctgcgcggattgccgcctttatcccgggttggggtgcgtcggcaagcggcatactcggtacgctgtttttctggtacggcgcggtgtgcatggctttgcccgttatccgttcgcagaatcaacgcaactatgttgccgtgttcgcgctgttcgtcttgggcggcacgcatgcggcgttccacgtccagctgcacaacggcaacctaggcggactcttgagcggattgcagtcgggcttggtgatggtgtcgggttttatcggtctgattggtacgcggattatttcgttttttacgtccaaacgcttgaatgtgccgcagattcccagtccgaaatgggtggcgcaggcttcgctgtggctgcccatgctgactgccatgctgatggcgcacggtgtgttggcttggctgtctgccgtttttgcctttgcggcaggtgtgatttttaccgtgcaggtgtaccgctggtggtataaacccgtgttgaaagagccgatgctgtggattctgtttgccggctatctgtttaccggattggggctgattgcggtcggcgcgtcttatttcaaacccgctttcctcaatctgggtgtgcatctgatcggggtcggcggtatcggcgtgctgactttgggcatgatggcgcgtaccgcgcttggtcatacgggcaatccgatttatccgccgcccaaagccgttcccgttgcgttttggctgatgatggcggcaaccgccgtccgtatggttgccgtattttcttccggcactgcctacacgcacagcatccgcacctcttcggttttgtttgcactcgcgcttttggtgtatgcgtggaagtatattccttggctgattcgtccgcgttcggacggcaggcccggttgagacaaaccgccgcagatttcgggtctgggcggtttgcttttcagacggcagggcggtcagttgccgtccagccagcggtcgcgtgtggttttggcttcttcaaaatagcggtacagggcttcgcggtcgtcggtggtcaggatgtttgccaaaacgtccaactgtttgcccaagccttgaaccagttgcagcaggctgtctttgttggcaaggcagatgtccgcccacacggcgggatgaccggaggcgatgcgggtgaagtcccgaaagcccgtggcggcgaatttcagatattcctgtccgtcggggtggtcgagaatctggtggacataggcgaaggcggtcaggtggggcatatgggagacggcggcgaaaaccgcgtcgtggcgttgcgcgtccatcgtataaatttccgcaccgaccgcgtgccacaggttttctaccaaggcaatgccgtctgaatgttcgccgccgtgtggcgtgatgatgagttttctgtggcggaacagcccgaactgcgcggcttgcgcaccgcttctgtccgaaccggcaattgggtgggcggcgatgcagtggtgcaggcggtcgggcagacagcggcggaaggcttcgatgaccgaagatttggtgctgccgacatcggaaatccaagtgtgttccggcaaaacggggcgcagcgcggtcaaaatggcgggaacggtggcgacgggcgtggcaatcagtaccaagtccgcaccgccgatgctgtccgcgtcgatggcaacggaagcctggtcaatcacgccgcgttccaatgcacgttcgaggttgtcgcggtcggtgtcgataccggtaacggtgcggacgagtccctgccttttgaggtcgagaacgaacgaaccgccgatcagccctacaccgatgagggcaatatggttcaaaatgggcatttgtgtaaacggttttcgcaaagtaccgtcatggtagcctatcggcggaatatgccgcaaggtcggcaggaaaaaggagaagaaatggacaaaatcagagttgccgccgtgcagatggtgtcgggcgtgtcgccggaaaccaacgtcgccgccatgaaacgcctggtcgcacgggcggcggagcagggtgcggattgggtgctgctgcccgaatattgggtgctgatgggcgcaaacgataccgacaaactcgcgcttgccgagcctttgggcggcggacgctttcagacggcattgagcgaaacggcgaaagaatgcggcgtggtgctgttcggcgggactgtgccgctgcaaagctgcgaggcgggtaaagtgatgaatacgctgttggtgtacggacgggacggcgtaaggacggggctgtaccacaaaatgcacctcttcggtttttccggtttgggcgaacgctatgccgaagccgataccatccgcgcgggcggggatgtgccgcacttgtcggcagaaggcgtgccggtggcggcgggcatttgttacgatgtccgctttcccgaatttttccgacgccagttgccgtttgacgtattgatgctgcccgctgcgtttacgcacacgacgggcaaggcgcattgggagctgctgctgcgcgcgcgtgccgtcgaaaaccaatgttacgtcgtggcggcggcacagggcggtttgcacgaaaacggacggcgcacgttcggacacagcatgattgtcgatccgtggggcgacgtgttggacgtattgcccgagggcgaaggcgttgttacggcagacatcgatgccaaccgcctgaacagcgtccgcaaccgcctgcccgccttgaaataccgggttttggatgccgtctgaaggttcagacggcatcggtgccggggaatcagaagcggtagcgcatgcccaatgagacttcgtgggttttgaagcgggtgttttccaagcgtccccagttgtggtaacggtatccggtgtccaaggtcagcttgggcgtgatgtcgaaaccgacaccggcgatgacaccaagacccacgctgctgatgctgtggctttcgtgatagggaggtttgctgggatcagtttgtataatagggcctccctgtggagagccgttctttggtttagaggtaatagtcgtggtttttgtttccaccgaatgaacttgatgtttaacgtgtccgtaggcgacgcgcgcgccgatatagggtttgaatttatcgttgagtttgaaatcgtaaatggcggacaagccgagagaagaaacggcgtggaagctgccgtttccctgatgttttgtttgggtttctttgtagttgttgtttatctcttcagtaacttttttagtagaagaattactttctttccattttctgtaactggcataatctgccgctattctccagccgccgaaatcatagccgaccgacacccgggggtggatggaatgcgcacggatgtttctgaaataatcgcttaccgtgcttgtgttgtttgcaccggttgcttgcggataatcgtgggtaatgcgttcggcggcataagctaaatccgcctgcacataatacgggctgcggctgccgtcttcacttgccgcctgcgctgcggaagagaagagaagagaagagaagagaagagaagagaagagaagagaagagaaggttttttgggggctggattcattttcgactccgtattcggttttaactgattaaaaagaaagattttcactgatgttgcaggggtggattgtatcgggtttggggcgatgtttcaacacaatatagcggatgaacaaaaaagagaacgatgctctaaggtgcccaagcaccaagtgaatcggttccgtactatagtggattaacaaaaaccagtacagcgttgcctcgccttagctcaaagagaacgattctctaaggtgctgaagcaccgagtgaatcggttccgtactatttgtactgtctgcggcttcgtcgccttgtcctgatttttgttaatccgctataaagaccgtcgggcatctgcagccgtcattcccgcgcaggcgggaatctagaccttagaacaacagcaatattcaaagattatctgaaagtctgagattctagattcccacgaaagtgggaatccaggatgtaaaatctcaagaaaccgttttatccgataagttcctgcactgacagacctagattcccgcctgcgcgggaatgacgggattttaggtttctgattttggttttctgtccttgtgggaatgacgggatgtaggttcgtaggaatgacgtggtgcaggtttccgtgcggatggattcgtcattcccgcgcaggcgggaatctagaccttagaacaacagcaatattcaaagattggcggattcgcatttgaagtgcaactttccctaacagaaaaaggccagtatgcggtagcatacggcctttcctgcaagaaagattgccatgagctacacgcaactgacccaaggcgaacgataccacatccaatacctgtcccgccactgcaccgtcaccgaaatcgccaaacagctgaaccgccacaaaagcaccatcagccgcgaaatcagacggcaccgcacccaagggcagcaatacagcgccgaaaaagcccagcggcaaagccagactatcaaacagcgtaagcgacaaccctataagctcgattcgcagctgattcagcacatcgacccccttatccgccgcaaactcagtcccgaacaagtatgcgcctacctgcgcaaacaccaccagatcacgctccaccacagcaccatttaccgctaccttcgccaagacaaaagcaacggcagcacgttgtggcaacatctcagaatatgcagcaaaccctaccgcaaacgctacggcagcacatggaccagaggcaaagtacccaaccgtgtcggcatagaaaaccgacccgctatcgtcgaccagaaatcccgtatcggcgattgggaagccgacaccattgtcggcaaaggacagaaaagcgcattattgaccttggtcgaacgcgttacccgctacaccatcatctgcaaattggatagcctcaaagccgaagacactgcccgggcagctgttagggcattaaaggcacataaagacagggtgcacaccattaccatggataacggcaaagagttctaccaacacaccaaaataaccaaagcattgaaagcggagacttatttttgtcgtccttaccattcttgggagaaagggctgaatgagaacaccaacggactcatccggcaatacttccccaaacaaaccgatttccgtaacatcagtgatcgggagatacgcagggttcaagatgagttgaaccaccgaccaagaaaaacacttggctacgaaacgccaagtgttttattcttgaatctgttccaaccactaatacactagtgttgcacttgaaatccgaatccaagattatctgaaagtctgagattctagattcccactttcgtgggaatgacgggattttaggtttctgattttggttttctgtccttgtgggaatgacgggatgtaggttcgtaggaatgacgtggtgcaggtttccgtgcggatggattcgtcattcccgcgcaggcgggaatttggaatttcaatgcctcaagaatttatcggaaaaaaccaaaacccttccgccgtcattcccacgaaagtgggaatctagaaatgaaaagcagcaggcatttatcggaaatgaccgaaactgaacggactggattcccgcttttgcgggaatgacggcgacagggttgctgttatagtggatgaacaaaaaccagtacggcgttgcctcgccttagctcaaagagaacgattctctaaggtgctgaagcaccaagtgaatcggttctgtactatttgtactgtctgcggcttcgtcgccttgtcctgatttttgttcatccgctatacttttgtatgaccatctgactttatcactcactatgttttaccaaatccttgccctgattatctggagcagctcgtttattgccgccaaatatgtctatggcggcatcgatcccgcattgatggtcggcgtgcgcctgctaattgccgcgctgcctgcactgcccgcctgccgccgtcatgtcggcaagattccgcgtgaggaatggaagccgttgctgattgtgtcgttcgtcaactatgtgctgaccctgctgcttcagtttgtcgggttgaaatacacttccgccgccagcgcatcggtcattgtcggactcgagccgctgctgatggtgtttgtcggacactttttcttcaacgacaaagcgcgtgcctaccactggatatgcggcgcggcggcatttgccggtgtcgcgctgctgatggcgggcggtgcggaagagggcggcgaagtcggctggttcggctgcctgctggtgttgttggcgggcgcgggcttttgtgccgctatgcgtccgacgcaaaggctgattgcacgcatcggcgcaccggcattcacatctgtttccattgccgccgcatcgttgatgtgcctgccgttttcgcttgctttggcgcaaagttataccgtggactggagcgtcgggatggtattgtcgctgctgtatttgggtttggggtgcggctggtacgcctattggctgtggaacaaggggatgagccgtgttcctgccaatgtttcgggactgttgatttcgctcgaacccgtcgtcggcgtgctgctggcggttttgattttgggcgaacacctgtcgcccgtgtccgccttgggcgtgtttgtcgtcatcgccgccaccttggttgccggccggctgtcgcatcaaaaataaagttgggaagcggtatttgatgattgccgaataggctgaaatctttccatctccattcctgcgaaagcgggtatccggaacgaaaagacggatatttatccgaaataacgaccatctttgcgtcgtcattcccgcgcaggcgggcatccggttttttgagtttcggttatttccgacaaattgctgcagcgttggatgtccggatttccgcctgcgcgggaatgacgggattttatagtggattaacaaaaatcaggacaaggcggcgagccgcagacagtacagatagtacggaaccgattcacttggtgcttcagcaccttagagaatcgttctctttgagctaaggcaaggcaacgctgtactggtttttgttaatccactatatcgttccggttcgtccggttttgccggggcttttgttgccgcctgtttgtgccggtgtgttaaaattttccgtttccgcgtattgtgttttccgccgccgggcggtttgtttgcgaatcggacgagaatttatgccttctgcccattatcctgaaatgagcgaaaaactgatggcggttttgatggcgatgctggttacgctgatgccgttttccatcgatgcctacctgcccgcgattcccgaaatggcgcaatcgctgaacgcggatgttcaccgcatcgaacagagtttgagtttgtttatgttcggcacggcgttcggacaggtggtcggcggttcggtgtccgacatcaaagggcgcaaacccgtcgccctgaccggtttgattgtatattgccttgccgttgccgccatcgtatttgtttcgagtgccgaacagctcctcaacctgcgcgtcgtgcaggcattcggtgcgggcatgactgtggtcatcgtcggcgcaatggtgcgcgattattattccggacgcaaagccgcccagatgtttgcccttatcggcatcattttgatggttgtgccgctggtcgcacccatggtcggcgcattgttgcagggcttgggtggctggcaggcgatttttgtttttctggcggcgtattcgctggtgctgctcggtttggtacagtatttcctgcccaagcccgccgtcggcggcaaaatcggacgggacgtgttcgggctggtggcggggcggttcaagcgcgtattgaaaacccgtgctgcgatgggttatctgttttttcaggcattcagcttcggttcgatgttcgcctttctgaccgaatcttccttcgtgtaccagcagctctaccgtgttacgcctcatcaatacgcttgggcgtttgcactcaacatcatcacgatgatgtttttcaaccgcgttaccgcgtggcggctcaaaaccggcgtgcatccgcaaagcatcctgctgtgggggattgtcgtccagtttgccgccaacctgtcccaactcgccgccgtgctgtttttcgggttgcccccgttttggctgctggtcgcgtgcgtgatgttttccgtcggtacgcagggcttggtcggtgcaaacacgcaggcgtgttttatgtcctatttcaaagaagagggcggcagcgcaaacgccgtattgggtgtattccaatctttaatcggcgcgggggtgggtatggcggcgaccttcttgcacgacggttcggcaaccgtgatggcggcaacgatgaccgcgtccacctcttgcggcattgcgcttctgtggctctgctcgcatcgtgcgtggaaagaaaacgggcaaagcgaatacctttaacggaaaatgccgtctgaaaccgtttcagacggcatttgatgttagaatgcacgataaattactgttcaggcgaaattatgtcccaaactatcgacgaactcctccttccccaccgcaacgccatcgacaccatcgatgccgaaatcctgcgcctgctcaacgaacgtgcgcaacacgcccacgccatcggcgagctgaaaggcacgggcgcagtgtaccgccccgaacgcgaagtcgccgtgttgcgccgcattcaggatttgaacaaaggcccgctgcccgacgaatcggtagcacgcctgtttcgggaagtgatgagcgagtgcctcgccgtcgaacgcccgctgaccatcgcctatctggggccgcagggcacgtttacccagcaggcggcaatcaaacatttcggacacgccgcgcacaccatggcgtgtccgaccatagacgactgcttcaagcaggttgaaacgcgtcaggcggattatctggtcgcccccgtggaaaattcgaccgaaggctcggtcggtcgcacgttagacctgcttgccgttaccgcgttgcaggcgtgcggcgaaatcgttttgcgcatccaccacaaccttttgcgtaaaaacaacggcagcaccgaaggcattgccaaagtcttttcccacgcgcaggcgttggcgcagtgcaacgactggttgggcagacacctgcccaacgccgaacggattgccgtgtccagcaatgccgaagccgcaaggctggttgccgaatcggacgacggtacggttgccgccatcgccggacgcacggcggcggaaatctacggactcgatatggttgccgagtgcatcgaagacgaaccgaacaacaccacgcgcttcttggtgatgggacatcacgaaaccggtgcaagcggcagcgacaagacttcgctggccgtttccgcgcccaaccgggcaggcgcggttgcctcgctgctgcaaccgctgaccgaatcgggtatttccatgaccaagtttgagagccgtccgagcaaatccgttttgtgggaatacctgttcttcatcgacatcgaaggacaccgccgggacgcgcagattcagacggcattggaacgcttgggcgaacgcgcttcgttcgtcaaagtcatcggttcgtacccgaccgccgttttgtagcggcggcagcgttcagacggcatttccccaacgattatgtccgaataccgagtcaaccatgaacccgtttttatgctggcatcttcgccctggcgcgaaagcagcctgtgggttgaagcattcagccgccgttacgggcgtgtggctttgctggcgcgcagcgcgcgcaaaaggcagagcgagctgcgcggcgtattggtgccgttcgtgcccgtcagcgtgtcgtggtacggcagtcaggaactcaaaaccctacaccgcgccgaatgggtcggcggttggcggcagcctcagggcagggcgttgttcggcggattgtatgtgaacgagttggtgttgaaactgaccgcccgcgaagacccggtgcccgagttatacgacgcgttggcggaagtgatggaggcggtgtgctgcaaagccgcttatatcgacgacttgcgccgtttcgagtggcggctgctgaacctgttgggcgttgcccccgatttgaaccgcgacggggacggcgggacgattgcggcaggcggcacataccttgtccgcccggaaacagccgtcttccccgtcggaaaaggatttgccgtaccgccgcacgccgccggcgttgtcgcccccgggcagagcctgatcgatttgcgcgaaggcagtttccgcactgccgaaagcctgcaacaggcattgaaaatcacacggctttttatccgccacctgttgcccgaggggctgaaatcgcggcaggtgttggaacagatacggcagtttgaccgcaaagaaaccgcccgggaaaccgtcccgacttcggacggcacggcttcaaatgccgtctgaaggcagaaataaaaggaaagattatgcttttaggtgtcaacatcgaccacatcgccaccgtccgcaatgcgcgcggtacgacttatcccagccccgtggaggcggcactggttgccgaaacgcacggtgcggatttgattaccatgcacctgcgcgaagaccgccgccacatcaaagacgcggacgtgtttgccgtcaaaaacgccatccgcacgcgcctgaaccttgaaatggcgttgacggaagaaatgttggaaaacgctttgaaagtgatgccggaagacgtgtgcatcgtgcctgaaaaacgtcaggaaatcacgaccgaaggcggtttggacgtattggcgcaacaggaaaaaatcgccgggttcaccaaaatcctgaccgacgcaggcatacgcgtgtctttgtttatcgatgccgacgacaggcaaatccaagccgcccgtgatgtcggcgcgcccgttgtcgagctgcacacaggcgcgtatgccgacgcgcgcagccacgccgaacaaatcaggcagttcgagcgcatccaaaacggcgcgcatttcgccggcgatttgggcttggtcgtcaacgccggacacggactgaccatacacaacgttacccccatcgcccaaatcctcgccatccgcgaactgaacatcgggcattcgctgattgcccaagccctcttcctcggactgcccgaagccgtgcgccaaatgaaggaggcgatgttcagggcaaggctgctgccgtaagggcaggcaaaccctttcagacagcatttcacgacagggatatgttatagtggattaaatttaaatcaggacaaggcggcgaagccgcagacagtacaaatagtacggcaaggcaagccaacgccgtactggtttaaatttaattcactatatgaatcaaaagtatattttatctgcaaacaataatagtttgatagaagaaattcacaatacagtacagagtattgggtattgtattgttcgaggtcttaatctaaaccatcttgatggcagccggagaaacaagaaattatttgactttctatctcaattaggaatgctgacaaaccacaaaggcgatggttttaaatctatattttgggatattaaatattgaggcgatgattatgtaatatagtggattaacaaaaatcaggacaaggcgacgaagctgcagacagtacagatagtacggaaccgattcacttggtgcttcagcaccttagagaatcgttctctttgagctaaggcgaggcaacgccgtactggtttttgttaatccactataaataatgatataactttctcggaagatgttggagaatgtccacttcatagtgattcatcttttagtgaaaacccggaaagttatttggttatgtatgtagtaaaatcagccaatgatggaggtaattccctatttttaagttcatcagatattgtcaatcagttatctaaaacagaaaccggtaaaaaacacttaaaaacattaacgggcaatttatatccatttaaaacaccagcatcatttgataaaaaacaaggtgtgagatggggtaatatcttatcggtcaatactcaaatgattagatttagaagtgattgtatctataaaggtattgaagaaaatagaaataaagtatcaaaggaaatggtacttgcacttgattatcttataaatgttataaaaaatgcgagtgatattcaagaattttctgcacaagatgatggtttgattattattgacaatgtcaatggcttgcatgccagaactgattatacggataaaaacaggcattatattagagcaagaattactgtataaaggacggttatgcaagaaataatgcaatctatcgtttttgttgctgccgcaatactgcacggaattacaggcatgggatttccgatgctcggtacaaccgcattggcttttatcatgccattgtctaaggttgttgccttggtggcattaccaagcctgttaatgagcttgttggttctatgcagcaataacaaaaagggtttttggcaagagattgtttattatttaaaaacctataaattgcttgctatcggcagcgtcgttggcagcattttgggggtgaagttgcttttgatacttccagtgtcttggctgcttttactgatggcaatcattacattgtattattctgtcaatggtattttaaatgtatgtgcaaaagcaaaaaatattcaagtagttgccaataataagaatatggttctttttgggtttttggcaggcatcatcggcggttcaaccaatgccatgtctcccatattgttaatatttttgcttagcgaaacagaaaataaaaatcgtatcgtaaaatcaagcaatctatgctatcttttggcgaaaattgttcaaatatatatgctaagagaccagtattggttattaaataagagtgaatacggtttaatatttttactgtccgtattgtctgttattggattgtatgttggaattcggttaaggactaagattagcccaaatttttttaaaatgttaatttttattgttttattggtattggctctgaaaatcgggcattcgggtttaatcaaactttaattcattattaaatgccttaactccttattaaataattggcacgatgttttagaatttcaaatgcaaaaggttacagtgaaaattgttaccgacaaaaccccaaaagtggatattcacgccattttaacgccccaagaaattgacggcattcatcatcacattcatcactacccgcaaccaagggcgaaggagcgcaaatatgatttacggcatcggcacagacattgtttccctcaagcgcatcatccgcttaaacaaaaaattcggacaggcgtttgccgggcgcatcctcactccggaagagctgcttgaatttccgcaagcgggcaaacccgtcaactacctcgccaaacgctttgccgccaaagaagcctttgccaaagccgtcggcacgggcatacgcggcgcggtttccttccgcaacatcggcatcgggcatgacgcattgggcaagcccgaatttttctacggccccgccctgtccaaatggctggaggaacaaggcatcagccgcgtcagcctcagcatgagcgacgaagaagacaccgtattggcgtttgtcgttgccgaaaaataatgccgtctgaaatgcggcaaacccgttgacggcattgcccgtccctcatttgcactccgaccgaccaaccgcgtacccgccatgattcaagacacccgaccccttatccgcgtcgttgccggcatcctgctcgattcagacggcaactacctgctcagctcgcgccccgaaggcaaaccctatgccggatattgggaatttgccggcggcaaggtcgaagcgggcgaaaccgacttccaagccctgcaacgcgagtttgaagaagaactcggcatccgcatcctcgccgccacgccttggttgaccaaaatccattcctacgaacacgcccgcgtctgcctgaaattcctatgggtcaaccccgaccaatggacgggcaaaccgcaatcccgcgaagggcaggaatggtcttggcagaaggcgggtgattttaccgttgcccccatgctgcccgccaacggcgcgcttttgcgttcgctgtccgtcccgcgccgtttgtacggcagcctgaaaacgggtttgcacggagaaaacagtatgggcgcgtaccgcgtcctgcctttgggttcggcagagggaagcggtgcgaacgttttgatggaggcggcgcaatggcaggacagacccgaacacgccgacagcgtgtggatggtggtgcagacccgcgaacaatggcggcgggcgcaggaaaagggcgcggatgcggtcgtttggcgcgtgtgcgatgatgttcaggcacaagaggcggcagaagccctgcggcagggcgtatccgtgccgctcgtacttgcagcaaacggacagacggttgcacgttatggaaaactatggctcggattgggggcgcacgtggtggtaagggatgaaacaatagggaagaatcatgaataaaaaccgtaaattactgcttgccgcactgctgctgattgcctttgccgccgtcaagctcgttttgttgcaatggtggcaggcgcagcagccgcaagctgtggcggcgcaatgcgatttgaccgagggttgcacgctgccggacggaagccgcgtccgcgccgccgccgtttcaaccaaaaaaccgtttgatatttatatcgaacacgcgcccgccggcacggaacaggtcagcatcagcttcagtatgaaaaatatggatatgggtttcaaccgctatatgttcgagcggcaaccgtcggggacttggcaggcagtacgcatccgcctgcccatctgtgtcgaaggcaggcgcgattttacggcggacattacaatcggcagtcggacatttcagacggcatttaccgccgaataaacctttcaatccgccattgccggaacatccgtccggaaaggacacgttatgaatactttatatacacttttcgccacctgcccgcgcggcttggagaccgttttatctcaagaactcgaaagcctcggctgtaccgatgtacaagtgtttgacggcggcgtttcctgccggggcggattggaacaggtttacgccgccaacctgcattcgcgtactgccagccgtatcctgctgcgcctgaccaaagggacataccgcaatgagcgcgacatctacaaactcgccaaaaatatcaactggtttaattggtttactttacagcagacgttcaaagtcaaagtcgaggcaaagcgtgccaacgttaagagcatccaatttgtcggactgaccgtcaaagatgccgtctgcgacgctttccgcgacatttacgacgcacgtccgagcgtggacaaagccgcgcccgatgtccgcatccacgcctttttgaacgaacgcaatgtcgaaatctttattgacacttcgggcgaagccctgttcaaacgcggctaccgcctggataccggcgaagccccgctgcgcgaaaaccttgccgccggactgctgctctcggcaggctacgacggcacgcagccgtttcaagacccgttttgcggcagcggcacgattgctatcgaagccgcttggattgccgcccgccgcgcgccgggtatgatgcgccgtttcggttttgaaaaactgcaaaatttcgataaaacgctgtggtcggatttgcggcgccgcgccgaagcgcaaacccgccccgtccgcgccccgattgcaggcagcgacaacgaccgccgcatcgttcagacggcattggacaacgcacgccgcgccggggtggacgacatcgtttccttcagcgttgccgacgcgcagtccgtccgaccgaacggcgaaaacggcattatggtgtccaatccgccctacggcgtgcgccttgaggaagtccgcgccttgcaggcactgtatccgcagttggggacgtggttgaaaaaacattacgcaggctggttggcggcaatgtttaccggcgatagggaaatgcccaaattcatgtgcctgtcgcccaagcggaaaatcccgctttataacggcaacatcgactgccgcctgttcctgattgatatggtggaaggatcgaaccgttgaggaaagtgtacaaaaatgccgtctgaaaaatgttcagacggcatttatttttcggaatcaaccccgcttcaatacggatgtattgatgtagcgttggacacccgaggcaatggattgggcgcactgccggcggaaggattcgctgcccagcagcttctcttcggcaggattggacaggaaggcggtttcgaccaggatagacggcatatcgggtgcgcgcaaaacggcgaaattggcttcgtccaccctgcctttgtgcagatggttgagcctgcccaattcttcaagcaccagtttgccgagtttgcggctgtcgcgcagcgtggcggtttgggtcatgtcgagcagggcggtatcgacattgcggttgccgctggtcggtacgccgccgaccgcgtcggcattgttttgcgtctgttccaagaatttggcggcagagctggttgcgcctttggtgtttaacatataaacccccgtgccgcgcgcggaggggctggtgaaggcatcggcgtggatggagacaaatacgtccgcccgccgtgctcgccctttggcgacacgcacgcccaatgggatgaacacgtcttcgttgcgcgtcataaatacattgtaacctaatgcttccaactgatttttggtttccctggcaatggataggacgacatgtttttcctgtagaccgcccgggctgatggcgccggggtcttcaccgccgtgtcccggatcgagcatgatgacgggtctgcgcccgtttctgccgcgcccgggttggggcgtggtgttttgggcgaggtcggcttcgggagagccgcgcagggttttattcaggctaccgttgagcagtgccatcatcggatcgtcggcatccatcccgtgcggatagaggtcgacgacgaggcggttcttaaagccgccgacgggcggaagcgcgaagacttgtgcgtgggtgggctgtttcaaatcgatgacgaggcggacggtggtcggcgtgttctgacccgcgcgtatgctgcggataaaggggtcgtctgccatgactttctgagacagtccgtgcaatacggtattgatgttcgcgttttgtatgtcgacgaccagcctgcccgggttgtcgagcgtgaagtgctggtatttgagcgcggcggtgctttccagcgtcaggcgggtgtaggtgtgcgacggccatatccgtgcggcggtgaattgcggggcgcgtaccgttttggcaacggcggatgcgatggggcttagggcgaacagtgtgccggcggtgcggcggatgatttgtcttcgtgtcagtttgatcatagcggcaggctttcgcgtcctcgttcggtatgggcggtcagcaggcattttctgccgtcgccgtcgtgtgtcaatgttgcggtgatgtcggcgggcggcgtaaattccccgccctgttgcggccattcgatcaggcagacgctgtttgcggcaaacagttcgtcaagccccgcgtcttcccattcttcggggaacgagaagcggtagaggtcgaaatggtgcagggtgaagcgttccagcggataagattcgacgatggcgtaggtcggacttttgactgcgccctgatgacccaatccgcgcaggatgccgcgtgtcagcgtggttttgcccgcacccaaatccccttcgagataaatgaccagcggtgcgtttaaacgggaagaccacgccgcgcccaaatcgagtgtggcggcttcgtcggcaaggaatcgggagatagagggtaaatcagacatggaaacggtttgttgtaaggtctagggtattatgggcagttttgcaggttttgcaaactttgcacccgaggggcggatgcttcttgtccgagcattataacagccaaatccgcgttctgctttcagacggcaacggctgtcaagaaaaagcggcgcgtgtacaatacgcggattgtatgtttaggacggattggaaaaagaatggaaaatatcggcaggcagcgacccatcggcgtttttgactcgggaatcggcggtttgaccaatgtgcgagcgctgatggaacggctgccgatggagaacatcatttatttcggcgacacggcgcgcgtgccttacgggacgaaatctaaggcgaccatcgaaaatttctcgatgcagattgtcgattttttattggaacacgatgtcaaggcgatggttatcgcgtgcaatacgattgcggcggtggcggggcagaaaatccgtcaaaaaaccggcaatatgcccgttttggacgtgatttccgccggcgcgaaagccgcgctggcaacgacgcgcaacaataaaatcggcattatcgccaccaatacgacagtcaacagcaatgcttatgcgcgcgccatccataggaacaaccccgacacgctcgtccgcacgcaggccgcgccgctgctcgtccctttggtggaagagggctggctggaacacgaagttacccgcctgaccgtatgcgaatacctcaaaccattgcttgcagacggcatcgatacgctggtgttgggctgcacgcactttcccttgctcaagcccttaatcggcagggaggcgggcaatgtcgcgttggttgattctgcaattacaacggccgaagaaaccgcacgcgtccttgctcaggaaggattgctcaataccgacaacaacaatcccgactaccgtttttacgtcagcgatattcctttgaaattcagaaccatcggcgagcgttttctgggcaggacgatggagcagattgaaatggtgtctttgggttaaaacgatgacggaaagctgcccgagattacagaaacctaaaatcccgtcattcccacgaaagtgggaatctagacctgtcggtgcggaaacttatcggataaaacggtttctttagattttacgttctagattcccactttcgtgggaatgacgggattagagtttcaaaatttattctaaatagctgaagctcaacgcactggattcccgcctgcgcgggaatgacgaatttcaggtttctgtttttggttttctgtttttgtgaaaataacgggatttcagcttgtgggtatttaccggaaaaaacagaaaccgctccgccgtcattcccgcgcaggcgggaatctagacattcaatgctaaggcaatttatcgggaatgactgaaactcaaaaaactagattcccactttcgtgggaatgacggaatgtaggttcgtgggaatgacgggatgcaggtttccgtatggatggattcgtcattcccgagcagacgggatctagacattcaatgctaaggcaatttatcgggaatgactgaaactcaaaaaactagattcccactttcgtgggaatgacgggatataggtttccatgcggacgcgttcggattcacgactgcgcggaaatgacgggattttggtgtattccctaaaaaaataaaaaaacatttgcaactttgttaaaaataaaggctgtgttttaacgatgtgttgatatttaattttagaaaggtagctatttaatagttaccttttcttatttaaaaatagctttctcaaattccatgaacgcctcaatacgatatgcagatgctctatcgaaattaagtttcaacattttgtttattaaacattttattttagccatttttcaatatacccccaaatatacccccaatttgcacaagtcaaaattttaggcaggggttttgttgctcccatgatacgcgggcggatgccggcttttcgcgggggaaatacaaggggtctcggttcgggtgtcaaaatccctgtttcgtgttagtcatgtgggggggaagagggggttagaatgaagtaaagctgttgccctctccccgcaatagttccattaggcgcggatgaatgaatagtttgtccctgccgatgacgatttcttgcagcacacctatgtctgaaagctctttcaggtacttagaggccgtctgccgtttggctatccctgccgcttctaggttggcaatgcgtgtatatggctgctcaaacagaagatttaccagttcgtgcgtgtagattccttgtgcgtgtgtccgtatgtgttgccgtgtctgctcgaacaggcggcgtatcgcatctattttcgataccgtccaatcggcggtgtcagctacgccgtctaagatgtagattatccagctttcccagtcctgccgttcggttacgcctaaaagcaggcggtaatagtccgccctgttttcgatgatgtagcggctcaaatacaaaataggcaaatccaaaagccctttttcaatcaatagcaggctgttcaatatgcgccccgtccgcccgttgccgtccgtaaacggatggatggcttcaaattggtaatgtgccgccgccatgatgataagcgggtctaaatcgccgctttcgtgaataaaccgctcccaatttgccagcttgccgcgtatggtttcttctccttcgggcggggtatagacaacatttccgctgttgcctccttttagggctgtgccgcctgttttgcggatggccatttcgtaggggtgcttgatggcgttgcagaccatgatggcggtttgtgtgcataaagggcggctcgtcagtgattcatagcctgcaaacagggcggtgcggtattgcagggcttctttcgtggcagggtcttgccgttccgtatccatttgcagggattgaaacagcttgtccgtggtggttacgatgttttcaatttccgaacttgcacgggcttccataacaggaagggtgttaatcagcatggcttgattcggtatcaattctgccgcctgctttaaacgggcaagggatgcacgggcggctatacaacgtttcaggatggttttgctttcaatatcctgttttggcggcaggggtggtaaatcgttatagggaatattgggtttccagttgctcatatttaaaatttcggaaaatttaaagatgtttccagtatatgtttacgccgtgtatatatcaaggatatatgtttaaaaatttggcttttgtaagtatatgggaggtaaaaccgcccgcaaaagtcaatttgcatggggttaattcaaaatccgcccgcccttcatctgcccgcttccctaaaaaaaccgtatatatataactgtccgcattctatcgctccggcgacgatacccatatttccaagtttgtgtatcaaaattgtatatcgggcatagactatttcggcgaggacgaagatatagatttccacgattgaatacatggaagccaagtacgtctatcaacactatattaaaacacagcctttttttttgaggtttcgggtaacttttaaaccgtcattcctacgaaaacagaaaatcaaaaacagaaatctcaaatcccgtcattcccgcgcaggcgggaatctagacattcaatgctaaggcaatttctcggaaatgactgaaactcaaaaaactggattcccactttcgtgggaatgacggaatgtaggttcgtgggaatgacgtggtgcaggtttccgtatggatggattcgtcattcccgcgcaggcgggaatctagacattcaatgctaaggcaatttatcgggaatgactgaaactcaaaaaactggattcccactttcgtgggaatgacgcgattagagtttcaaaatttattctaaatagctgaaactcaacgcactggattcccgcctgcgcgggaatgacgaagtggaagttacccgaaacttaaaacaagcgaaaccgaacgaactggattcccactttcgtgggaatgacggaatgcaggttcgtgggaatgacggaatgcaggttcgtgggaatgacgtagtgcaggtttccgtatggatggattcgtcattcccgcgcaggcgggaatctagacatgcaatgctaaggcaatttatcgggaatgactgaaactcaaaaaactggattcccgcctgcgcgggaatgacgaagtggaagttacccgaaacttaaaacaagcgaaaccgaacgaactggattcccactttcgtgagaatgacgggatgcaggttcgtgggaatgacgtggtgcaggtttccgtatggatggattcgtcattcccgcgcaggcgggaatctaggtctgtcggtgcggaaacttatcgggtaaaacggtttcttgagattttgcgtcttggattcccactttcgtgggaatgacgcgattagagtttcaaaatttattctaaatagctgaaactcaacgcactggattccgcctgcgcgggaatgacgaagtggaagttacccgaaacttaaaacaagcgaaaccgaacgaaccggattcccactttcgtgggaatgacgaatttcaggttactgtttttggttttctgtttttgtgaaaataatgggatttcagcttgtgggtatttaccggaaaaaacagaaaccgctccgccgtcattcccgcgcaggcgggaatctaggtctgtcggtgcggaaacttatcggataaaacggtttcttgagatttttcgtcctggattcccactttcgtgggaatgacgcgaacagaaaccgctccgccgtcattcccgcgcaggcgggaatctagacattcaatgctaaggcaatttatcgggaatgactgaaactcaaaaaactggattcccactttcgtgggaatgacgtggtgcaggtttccgtatggatggattcgtcattcccgcgcaggcgggaatctagaccttcaatactaaggcaatttatcggaaatgactgaaactcgaaaaactggattcccacttttgtgggaatgacgcgattagagtttcaaaatttattctaaatagctgaaactcaacacactggattcccgcctgcgcgggaatgacgaagtggaagttacccgaaacttaaaacaagcgaaaccgaacgaactggattcccactttcgtgggaatgacggaatgtaggttcgtgggaatgacggcggagcggtttctgctttttccaataaatgaccccaacttaaaatcccgtcattcccgcgcaggcgggaatctaggtctgtcggtgcggaaacttatcgggtaaaacggtttcttgagattttgcgtcctggattcccactttcgtgggaatgacggaatgtaggttcgtgggaatgacgggatataggtttccgtgcggacgcgttcggattcatgactgcgcgggaatgacgggattttggtgtattccctaaaaaaataaaaaagtatttgcaaatttgttaaaaataaataaaataataatccttatcattctttaattgaattggatttattatgaacaatccattggtgaatcaggctgctatggtgctgcctgtgtttttgttgagtgcttgtttgggcggaggcggcagtttcgatcttgattctgtcgataccgaagccccgcgtcccgcgccaaaatatcaagatgttttttccgaaaaaccgcaagcccaaaaagaccaaggcggatacggttttgcaatgaggttgaaacggaggaattggtatccgcaggcaaaagaagacgaggttaaactggacgagagtgattgggaggcgacaggattgccggacgaacctaaggaactccctaaacggcaaaaatcggttatcgaaaaagtagaaacagacagcgacaacaatatttattcttccccctatctcaaaccatcaaaccatcaaaacggcaacactggcaacggtataaaccaacctaaaaatcaggcaaaagattacgaaaattttaaatatgtttattccggctggttttacaaacacgccaaacgagagtttaacttaaaggtggaacctaaaagtgcaaaaaacggcgacgacggttatatcttctatcacggtaaagaaccttcccgacaacttcccgcttctggaaaaattacctataaaggtgtgtggcattttgcgaccgatacaaaaaagggtcaaaaatttcgtgaaattatccaaccttcaaaaagtcaaggcgacaggtatagcggattttcgggcgatgacggcgaagaatattccaacaaaaacaaatccacgctgacagatggtcaagagggttatggttttacctcaaatttagaagtggatttccataataaaaaattgacgggcaaactgatacgcaacaatgcgaataccgataacaaccaagccaccaccacgcaatactacagccttgaggctcaagtaacaggcaaccgcttcaacggcaaggcaacggcaaccgacaaaccccaacaaaacagcgaaaccaaggaacatccctttgtttccgattcgtcttctttgagcggcggctttttcggcccgcagggtgaggaattgggtttccgctttttgagcgacgatcaaaaagttgccgttgtcggcagcgcgaaaaccaaagacaaacccgcaaatggcaatactgcggcggcttcaggcggcacagatgcggcagcatcaaacggtgcggcaggcacgtcgtctgaaaacggtaagctgaccacggttttggatgcggtcgagctgaaattgggcgataaggaagtccaaaagctcgacaacttcagcaacgccgcccaactggttgtcgacggcattatgattccgctcttgcccgaggcttccgaaagtgggaacaatcaagccaatcaaggtacaaatggcggaacagcctttacccgcaaatttgaccacacgccggaaagtgataaaaaagacgcccaagcaggtacgcagacgaatggggcgcaaaccgcttcaaatacggcaggtgataccaatggcaaaacaaaaacctatgaagtcgaagtctgctgttccaacctcaattatctgaaatacggaatgttgacgcgcaaaaacagcaagtccgcgatgcaggcaggagaaagcagtagtcaagctgatgctaaaacggaacaagttgaacaaagtatgttcctccaaggcgagcgcaccgatgaaaaagagattccaagcgagcaaaacatcgtttatcgggggtcttggtacggatatattgccaacgacaaaagcacaagctggagcggcaatgcttccaatgcaacgagtggcaacagggcggaatttactgtgaattttgccgataaaaaaattactggtacgttaaccgctgacaacaggcaggaggcaacctttaccattgatggtaatattaaggacaacggctttgaaggtacggcgaaaactgctgagtcaggttttgatctcgatcaaagcaataccacccgcacgcctaaggcatatatcacagatgccaaggtgcagggcggtttttacgggcccaaagccgaagagttgggcggatggtttgcctatccgggcgataaacaaacgaaaaatgcaacaaatgcatccggcaatagcagtgcaactgtcgtattcggtgcgaaacgccaacagcctgtgcgataagcacggctgccgaacaatcaagaataaggcctcagacggcaccgctccttccgatgccgtctgaaagcgaagattagggaaacactatgcaacagcaacatttgttccgattcaatattttatgcctgtctttaatgactgcgctgcccgcttatgcagaaaatgtgcaagccggacaagcacaggaaaaacagttggataccatacaggtaaaagccaaaaaacagaaaacccgccgcgataacgaagtaaccgggctgggcaagttggtcaagtcttccgatacgctaagtaaagaacaggttttgaatatccgagacctgacccgttatgatccgggtattgccgtggtcgaacagggtcggggcgcaagttccggctattcaatacgcggcatggataaaaaccgcgtttccttaacggtggacggcgtttcgcaaatacagtcctacaccgcgcaggcggcattgggcgggacgaggacggcgggcagcagcggcgcaatcaatgaaatcgagtatgaaaacgtcaaagctgtcgaaatcagcaaaggctcaaactcggtcgaacaaggcagcggcgcattggcgggctcggtcgcatttcaaaccaaaaccgccgacgatgttatcggggaaggcaggcagtggggcattcagagtaaaaccgcctattccggcaaaaaccgggggcttacccaatccatcgcgctggcggggcgcatcggcggtgcggaggctttgctgatccacaccgggcggcgcgcgggggaaatccgcgcccacgaagatgcaggacgcggcgttcagagctttaacaggctggtgccggttgaagacagcagcaattacgcctatttcatcgttaaagaagaatgcaaaaacgggagttatgaaacgtgtaaagcgaatccgaaaaaagatgttgtcggcaaagacgaacgtcaaacggtttccacccgagactacacgggtcccaaccgcttcctcgccgatccgctttcatacgaaagccggtcgtggctgttccgcccgggttttcgttttgagaataagcggcactacatcggcggcatactcgaacacacgcaacaaactttcgacacgcgcgatatgacggttccggcattcctgaccaaggcggtttttgatgcaaataaaaaacaggcgggttctttgcccggtaacggcaaatacgcgggcaaccacaaatacggcggactgtttaccaacggcgaaaacggtgcgctggtgggcgcggaatacggtacgggcgtgttttacgacgagacgcacaccaaaagccgctacggtttggaatatgtctataccaatgccgataaagacacttgggcggattatgcccgcctctcttacgaccggcagggcatcggtttggataatcattttcagcagacgcactgttctgccgacggttcggacaaatattgccgcccgagtgccgacaagccgttttcctattacaaatccgatcgcgtgatttacggggaaagccacaggctcttgcaggcggcattcaaaaaatccttcgataccgccaaaatccgccacaacctgagcgtgaatctcgggtttgaccgctttggctctaatctccgccatcaggattattattatcaacatgccaaccgcgcctattcgtcgaacacgccccctcaaaacaacggcaaaaaaatcagccccaacggcagtgaaaccagcccctattgggtcaccataggcaggggaaatgtcgttacggggcaaatctgccgcttgggcaacaatacttatacggactgcacgccgcgcagcatcaacggtaaaagctattacgcggcagttcgggacaatgtccgtttgggcaggtgggcggatgtcggcgcgggcttgcgctacgactaccgcagcacgcattcggacgacggcagcgtttccaccggcacgcaccgcaccttgtcctggaacgccggcatcgtcctcaaacctaccgactggctggatttgacttaccgcacctcaaccggcttccgcctgccctcgtttgcggaaatgtacggctggcgggcgggtgttcaaagcaaggcggtcaaaatcgatccggaaaaatcgttcaacaaagaagccggcatcgtgtttaaaggcgatttcggcaacttggaggcaagttggttcaacaatgcctaccgcgatttgattgtccggggttatgaagcgcaaattaaagacggcaaagaagaagccaaaggcgacccggcttacctcaatgcccaaagcgcgcggattaccggcatcaatattttgggcaaaatcgattggaacggcgtatgggataaattgcccgaaggttggtattctacatttgcctataatcgtgtccgtgtccgcgacatcaaaaaacgcgcagaccgcaccgatattcaatcacatctgtttgatgccatccaaccctcgcgctatgtcgtcggcttgggctatgaccaaccggaaggcaaatggggtgtgaacggtatgctgacttattccaaagccaaggaaatcacagagttgttgggcagccgggctttgctcaacggcaacagccgcaatacaaaagccaccgcgcgccgtacccgcccttggtatattgtggacgtgtccggttattacacggttaaaaaacactttaccctccgtgcgggcgtgtacaacctcctcaactaccgctatgttacttgggaaaatgtgcggcaaactgccggcggcgcagtcaaccaacacaaaaatgtcggcgtttacaaccgatatgccgcccccggtcgcaactacacatttagcttggaaatgaagttctaaacgtccaaacgccgcaaatgccgtctgaaaggcttcagacggcattttttacacaatccccgccattttccatcatccccgatacaccgtaatctcgaaacccgtcattcccgcgcaggcgggaatccagtccgttcggtttcggtttttttgaggtttcgggtaacttctaaaccgttattcccgcgaaaacagaaaatcaaaaacagaaacctcaaatcccgttattcccgagcagacgggatctagggcgtaaaatctaaagaaaccgttttatccgataagtttccgcaccgacagactagattcccgcctgcgcgggaatgacgttatatttttcgcatttgataaaaaagaccgtttgaaattttttcagcggacgcaaagtattgcgtaaaatgctgcttataagaaacgcaaggcgggcgtaggatgtgcagcgtggacatagggctggctgtagggtgggcttcagcccaccaatcccaccgtttccacctattcccccaactccgtcaatgttatccattccgcccattcccaccgaaaaccgaaaccgccgtattcccaaaaacctttgatgcggtgaaattggtgggctgaagcccaccctacagcccaccctacggctcgccgaaatttcgtcattcccgcgcaggcgggaatccaggtctgtcggtgcggaaacttatcggataaaacggtttcttgagattttacgtcctagattcccacttccgtgggaatgacgggatgcaggttttcgtgcggacgcgttcggattcacgactgcgcgggaatgacgggatttcagtttgcggattgatttgaagttgcaaaatcccaacggatcggattaccgctttcgcgtttcaaagttacggcgttatcggaaaaacagaaaatcaaagctgcaagaatttatttaaaacaaccgaatttcaacggatcggattctcgcctgtagggaatgacggcggaaggttttttgtcttttctgacagatgtccgcaatctgaaatcctgaccgtgggaacgacggtatagtggattaacaaaaaccagtacggcgttggctcgccttagctcaaagagaacgattctctaaggtgctgaagcaccaagtgaatcggttccgtactatttgtactgtctgcggctttgtcgccttgtcctgatttttgttaatccactatataaatatttctatttcaatccaatataaaatgccgtccgaacatcgttcggacggcatttttaatgcttcaaatcagttggtgccgactttgattttctgccacaggctgacagacagttttttcgcatccgtgctcatttgcggcatcacgaaaccgtctttcatatcctgctcgttcgggaagatggaacgggtgttcaccagctcggcaggcattttttcgcgcgccggtttgctggcgggggcaaaggttacggcgatgccgtttttcgccgcgatttcggggtcgagcgtgtagttgatgtatttgtgggcattggcgacgtttttcgcatcggcgggaatcagccaagactcaatccagaagcccatacctttcggtgtcagcacttcgatgccgacgttgtttttcacttcctcggaacgtgctttcgccaagttcaaatcgccgccgttgcctgccgccaggcagatgtcgccgcgtgccagctcgtcgatgatggacgggctgaaacgtttgacatccggacggatagacttcaacacttccgccgccgccttcaagtcttcaggattcgagcctttggggtctttgcccaagtagttcagcaaaatcgggaacatttcactcggggtgtcccacagggcgatgccgcaggatttcagcttgtgggtgtattcgggtttgaacagcaaatcccagccgttttcgggcagcttgccgcccaaaagctctttgcccttcgccgtaatcgcaatcgtgttcacgccggagaaataggggacggcatactggttgcccgggtcggcggtttccagcattttcaagagttcgggatcgatgtttttatagttgggaatcaggtctttgttgactttttgatacgcgcccgcctcgatttggcgcggcaggaaggcgatgcccggcacgaccaaatcgtaaccggatttgccggtcagcattttggcttccagcgtttcattgttttcgtacaagtcgtaagtcagcttcagattgttggcttttttaaagtcttcgaccgtactctcatcaacatagttcgaccagttgtagatgttcagagtatcggtggcagcggcttcggcattggcagcagacgcagcgtctgcttgaggttgcacggcgtttttttcgctgccgccgcaggctgccagagacagcgcggccaaaacggctaatacggattttttcatacgggcagattcctgatgaaagaggttggaaaaaaagaaatccccgcgccccatcgttaccccggcgcaaggtttgggcattgtaaagtaaatttgtgcaaactcaaagcgatattggactgattttcctaaaaaattatcctgtttccaaaaggggagaaaaacgtccgcccgattttgccgtttttttgcgctgtcagggtgtccgacgggcggatagagagaaaaggcttgcatataatgtaaaccccctttaaaattgcgcgtttacagaatttatttttcttccaggagattccaatatggcaaacagcgcacaagcacgcaaacgtgcccgccagtccgtcaaacaacgcgcccacaatgctagcctgcgtaccgcattccgcaccgcagtgaaaaaagtattgaaagcagtcgaagcaggcgataaagctgccgcacaagcggtttaccaagagtccgtcaaagtcatcgaccgcatcgccgacaagggcgtgttccacaaaaacaaagcggcacgccacaaaagccgtctgtctgcaaaagtaaaagccttggcttgatttttgcaaaaccgccaaggcggttgatacgcgataagcggaaaaccctgaagcccgacggtttcggggttttctgtattgcgggggcaaaatcccgaaatggcggaaagggtgcgattttttatccgaatccgctataaaatgccgtttgaaaaccaatatgccgacaatgggggcggagatgaatacacggaatatgcgctatattcttttgacaggactgttgccgatggcatccgcttttggagagaccgcgctgcaatgcgccgctttgacggacaatgttacgcgtttggcgtgttacgacaggatttttgcggcacagcttccgtcttcggcagggcaggaagggcaggagtcgaaagccgtactcaatctgacggaaaccgtccgcagcagcctggataagggcgaggcggtcattgttgttgaaaaaggcggggatgcgcttcctgccgacagtgcgggcgaaaccgccgacatctatacgcctttgagcctgatgtacgacttggacaaaaacgatttgcgcgggctgttgggcgtacgcgaacacaatccgatgtaccttatgccgctctggtacaacaattcgcccaactatgccccgggttcgccgacgcgcggtacgactgtacaggaaaaattcggacagcagaaacgtgcggaaaccaaattgcaggtttcgttcaaaagcaaaattgccgaagatttgtttaaaacccgcgcggatctgtggttcggctacacccaaagatccgattggcagatttacaaccaaggcaggaaatccgcgccgttccgcaatacggattacaaacctgaaattttcctgacccagcctgtgaaggcggatttgccgttcggcggcaggctgcgtatgctcggtgcgggttttgtccaccagtccaacggacagagccgtcccgaatcgcgttcgtggaacaggatttacgccatggcaggcatggaatggggcaaattgacggtgattccgcgcgtgtgggtgcgtgcgttcgatcagagcggcgataaaaacgacaatcccgatattgccgactatatggggtatggcgacgtgaagctgcagtaccgcctgaacgacaggcagaatgtgtattccgtattgcgctacaaccccaaaacgggctacggcgcgattgaagccgcctacacgtttccgattaagggcaaactcaaaggcgtggtacgcggattccacggttacggcgagagcctgatcgactacaaccacaagcagaacggtatcggtatcgggttgatgttcaacgacttggacggcatctgaaccgcgtgttcagacggtatatcaagttgccgtgccgtctgaagccgccggcggtttggcggggcgggataaaaatttcgtttgaatccgggcaaacgcgtataatgtgcggtttgtacggactttgtcggaatcaagcaagatgacggaacctgcggccgaaggcggcaaagctgccaaggcgttaaaaaaatatctgattacgggcattttggtctggctgccgattgcggtaacggtttgggtggtttcctatatcgtttccgcgtccgatcagctcgtcaacctgctgccgaagcaatggcggccgcaatatgttttggggtttaatatcccggggctgggcgttatcgttgccattgccgtattgtttgtaaccggattgtttgccgccaacgtattgggtcggcagatcctcgccgcgtgggacagcctgttggggcggattccggttgtgaaatccatctattcgagtgtgaaaaaagtatccgaatcgctgctgtccgacagcagccgttcgtttaaaacgccggtactcgtgccgtttccccagcccggtatttggacgattgctttcgtgtcagggcaggtgtcgaatgcggttaaggccgcattgccgaaggacggcgattatctttccgtgtatgttccgaccacgccgaatccgaccggcggttactatattatggtaaagaaaagcgatgtgcgcgaactcgatatgagcgtggacgaagcattgaaatatgtgatttcgctgggtatggtcatccctgacgacctgcccgtcaaaacattggcaggacctatgccgtctgaaaaggcggatttgcccgaacaacaataaagccgccgttcagacggcattttctgttttcagtttaaatcaataaaaggtgattttatgcgtaccaactattgcggcctgatcagtgagcaatacttagaccaaaccgttaccgtcaaaggctgggtacaccgtcgacgcgaccacggcggtgtgatttttatcgacctgcgcgaccgcgaaggcatcgtccaagtcgtgatcgatcccgacacgcccgaagcgtttgccgctgccgattcctcccgcaacgaatacgttttgagcattaccggccgcgtacgcaaccgtcccgaaggcacgaccaacgataaaatgatttccggcaaaatcgaaatccttgccaaagaaatcgaagtcttgaacgccgccgccacgccgccgttccaaatcgacgatgaaaacatcagcgaaaacgttcgcctgaccaaccgcgttatcgacttgcgccgtccggtgatgcaacgcaacctgcgcctgcgttaccaagttgctatgggcgttcgccgctacttggacgcgcaaggtttcatcgacattgaaaccccgatgctgacccgctccacgcctgaaggcgcgcgcgactacctcgtgccgagccgcgttcatccgggcgagtttttcgcgctaccgcaatcgccgcaattattcaaacaactgttgatggtggcgggtttcgaccgttactaccaaatcaccaagtgcttccgcgacgaagacctgcgtgccgaccgccagcccgaatttacccaaatcgacttggaaacctcgttcttaaacgaggatgaaatcatggacatcactgaaggcatggccaaacaagtcttcaaagatgctttaaatgtagatttgggcgacttcccacgcatgccttactctgaagccatgttctactacggctctgacaaaccggatatgcgcatcaacttgaaatttaccgagttgaccgacctgatgaaaacggaagaattcaaagtcttccgtggcgcagccgacatgaaaggcggccgcgtggtcgctctgcgcgtgccgaacggcgcagaattcagccgcaaagaaatcgacgaatacaccaaatttgtcggcatctacggcgcgaaaggtctggcatacatcaaagtaaacgatgtcagcaacctttccaacggcgaagacagcggcctgcaatctccaatcgtgaaatacctgtccgaaaacgccctgaaagaaattatcgcgcgtaccggcgcgcaaaacggcgacatcatcttcttcggcgcagacaaagccaaagtcgtgaacgaagccatcggcgcactgcgtatcaaagtcggcttggagcacggcaaagacaacggctatttcacagacgaatggaaacctttgtgggtcgttgatttcccaatgttcgaatacgacgaagaagccgaccgctacgttgccgtacaccatccgtttaccgcgccaaaagaaggtcatgaagacctgatggtttccgacccggcaaattgtttggcacgcgcctacgatatggtattgaacggctgggaaatcggcggcggctctatccgtattcaccgcgcagacgtacaagagaaagtgtttgccgcgctgaaaatcagccctgaagagcaacaagagaaattcggcttcctcttggacaacctgaaattcggcgcacctcctcacggcggtcttgcattcggcctcgaccgtctggtaacgctgatgaccggtgccgaatccatccgcgacgtgattgccttcccgaaaacacaacgcgcccaatgcctgctgaccaacgcgcccaacagcgtggacgacaagcagttgcgtgaattaagtttgcgtttgcgccagaaggcaaccgaaactaaagaagtataaggaaaacggagccgtttgacggctctgtttttttcagacggcatttacgcttcttgacttccctctaattcaaacctaattttgctgtgttttaatggcggtattgaaaaacacatcttgttcaatcaaccgataaaaaaaggactgaaaatgaaaaaactgttattggctgccgttgtttctctgagtgccgctgccgcatttgccggcgactctgccgagcgtcagatttacggcgatccccattttgaacaaaaccgcacaaaagctgtgaaaatgttggagcagcgcggttatcaggtttacgatgtcgatgccgacgaccattggggtaagcctgtgctggaagtggaagcctataaagacggccgcgaatacgacatcgtgttgtcttaccccgacctgaaaatcatcaaagagcagctcgatcgctgactcctttgatggaaagatgaaccaaaatgccgtctgaagcgttcagacggcattttgcctgttcctcatcaggtatgaggcaggcttttcttattaaaaaaatgacatttcacgctgatttgttataatcattccttttcaacacgacagacggagcaggtttattatgcctatccttaccatccgtgaagtgtgcaacattaatcattggggcataggttattatgatgttgacgattccggcgaaatcatcgtccgccccaatccctcgcaacacaatcaaactgtttcactgcaaaaactgactgaagccgtgcaacaaaaacatcaggcgcgcctgcctgttttgttttgttttccgcaaatcctcgaacaccgcctccgcgacattaaccgcgcctttcagacggcacgggaagagtgcggctataagggcggttattgtttggtttaccctatcaaggtcaaccaacaccgccgcgtcatcgaatcgcttatgtcaagcggacaaccgcatggtttggaagctggttctaaagccgaactgatggcggttttggcacacgccggcaaccggcaaacattaatcgtctgcaacggctataaagaccgtgaatatatccgtttcgccttgatgggcgaaaaactggggcatcaggtttatttggtgattgagaagctgtccgaaatacaaatggtattggaagaggcggaaaaactcggcatcaagccccgtttgggtgtgcgcgccagactggcttcccaaggttcgggaaaatggcagtcttcgggtggggaaaaatcaaaattcggcttgtcggcttcccaagttttgcaactggtcgatattttgaaacaaaaaaacaggctggattgcctgcagcttttgcatttccatttgggctcgcagcttgggaacatccgtgatgttgccacaggtgtacacgaatcggctcggttttatgttgagttgcacaaactgggggtaaatatccgctgttttgatgtaggcggcgggcttggcgtggattacgaaggaaaccgcacacaatcggattgttccgttaattacagcctcaacgaatatgccgccacagtcgtatggggcatcagtcaggcttgtctcgaacacgggctgccgcatccgacaatcatcaccgagagcgggcgcggcattaccgcacatcacgccgttttggttgctaatgttataggcgttgaacgttacaaaccgcgccggctggatgcgccatcgcccgaagcaccgcgtgtgttgcacagtatgtgggaaacttggacggatatttccgcctcgcgggaaaaacgttccttacgcagctggatacacgaagggcagtttgatcttgctgatgtgcataatcagtataatgtcgggctgttgagtttggcgcaacgtgcgtgggcggagcaactgtatttaaatatctgtcatgaagtcggcgaattgtttaatgaaaaacaccggtctcaccgaaccattattgacgaattgcaagaacgttttgccgataagctgtatgtcaatttctcactcttccaatctttgcccgatgcttggggcatagatcaacttttccctgtttgtcccattaccggtttgaatgaaccgattgcgcgccgcgccgtgttgttggacattacctgcgattcagacggtacgattgaccactacatcgacggagacggcatcgccggtacgatgcctatgcctgattatcccgaagaagagccgccgcttttaggcttttttatggtgggagcatatcaggaaatactcggcaatatgcacaatcttttcggcgacactgccactgccgatgttgttgtaggggaagacggacaatttaccgtcatcgattacgatgaaggaaacaccgttgccgatatgctcgaatacgtttatcaagatccgaaagagctgatgaaacgctatcgcgaacaaatcgaacattcagaccttcctgcctcgcaggctatgtctttcttaaaagaactcgaagcggggcttaatggttatacctatttggaagacgaatagacgcatcaaggcatcggatatgtcgtctgaagcccgattttcttactcaaacaccaatcatcacgaccgattgaaaccaattacaaggaatcattacgatgcaatacagcacactggcaggacaaaccgacaactccctcgtttccaataatttcgggtttttgcgcctgccgcttaattttatgccgtatgaaagtcatgccgattgggttattaccggcgtgccttatgatatggcggtttcagggcgttccggcgcgcgtttcggtcctgaagccatccggcgcgcctccgtcaacctcgcttgggagcaccgcaggtttccatggacatttgatgtgcgcgaacgcctgaacattattgattgcggcgacttggttttttcttttggcgacagcagggattttgtcgaaaaaatggaagcgcacgccggcaaattactttcttccggcaaacgctgtttgagtttgggcggcgaccatttcattaccctaccgttgttgcgcgcccacgcccgctatttcggcaaactcgcactgattcattttgacgcgcacaccgacacctacgacaacggcagcgaatacgaccacggtacgatgttctataccgcccccaaggaaggcctcatcgacccgtcccgttccgtacaaatcggcatacgcaccgaacacagtaaaaaattgccttttactgtgttgtccgcccctaaagtcaatgaagacagtgttgaagagaccgtccgtaaaatcaaagaaaccgtcggcaatatgcccgtttacctgactttcgacatagactgcctggacccgtcgttcgcccctgggaccggtacgcccgtatgcggcggcttgagcagcgacagggcattaaaaatcctacgtgggctgacggatctcgacatcgtcggtatggatgttgtagaagttgccccctcttacgaccaatccgacattaccgctttggccggtgccacaattgccttggaaatgctttaccttcaaggtgcgaaaaaggactgaacgtccggcatcccccgggttttcgccgtgccgttcaaacggcgtattcagtctaatgaaaattcaaatactgaaacaaaagttgcccggagccgcatatcggaaagacggtgaaatatcagaatatatcttataaaacaattagttaaatattatttttccgatttttcgggacggtcttttttacggaggtcaatatgatgaaattgggtttcaaaccgatacccctcgccattgccgcagtattgtgcgccctggttttggcactgcccgtacccgacggggtcaagcctcaggcttggacgctgctggccatgtttgtcggtgtgattgccgccattatcggcaaggccatgccgttgggcgcgctgtcgattattgccgtcgggttggtcgcagtaaccggcgtaaccgccgacaaaccgggcgcggcgatgagcgatgcgttgagtgcgttcgccaatccgttgatttggctgattgccatcgcagttatgatttcgcgcggtttgctcaaaacagggctggggatgcgtatcggatatttgtttatcgccgtttttggaagaaaaacgctgggcatcggttacagtctcgctctttccgaactgctgctggctcccgttaccccttccaataccgcgcgcggcggcggcattatacatccgattatgcagtcgattgccggcagttacggctccaatcccgcaaaaggcacagaaggcaagatgggtaaatatttggctttggtcaactatcattccaatcccatttcgtcggctatgtttattactgcaactgcccccaaccctttaatcgtcaacttgattgccgaaaatttaggcagtagtttccgtctttcttggggggcgtgggcgtgggcaatggctgttcccggcgttatcgcctttttcgttatgcctttgattttatattttttgtatccgcctgaaattaaagaaacgcccaatgccgttcaatttgccaaagaccgtctgagggagatgggtaaaatgtcggcagacgaaatcattatggcggtcattttcggtatcttgctgctgttgtgggcagatgttcccgcccttattaccggcaatcacgcttttagtatcaacgccaccgccaccgcatttatcggattaagcctgcttttgctttccggtgtattgacttgggacgatgttttgaaagaaaaaagcgcgtgggatacgattatttggtttggcgcattgattatgatggccgcatttttaaataaactcggactgattaaatggttctccggagtgttggcggaaagtgtcggcggtttgggcgttagcggcacggctgcgggcgtaatcctcgtgcttgcttatatgtatgcgcattatatgtttgccagtactactgcacatattaccgctatgttcggcgcatttttcgctgctgccgtttcactgaatgccccggcgatgccgaccgcgctgatgatggcggccgcatccaacattatgatgaccctcactcattatgcgaccggtacttcgcctgtgattttcggttcgggctacaccacaatgggagaatggtggaaggcgggttttatcatgagcgtagtcaattttctgatttttttcgttatcggcagcatttggtggaaagttctggggtattggtaagggaaaaataaaataaatttccaatctgtgtttatttgattgggcgactattatcgtgaaatatgccgtctaaagccttcagatggcatatttgtgcgcttgaatgttgcagaaagcggcaggcggcggtgtaggaaaagccaaacaaaaaccaaaccgcctatcaacttctgataaacataagcattaaataatcagaaggttattcaattacctaaacgcaaatttccctgccgtatcacatctattgaaaataatacatcaaccggctcggaagcagcctgatcaggtgtttctacttgcggcgatgaatcggcagccggttcggtataggcagtcggcgtgccgtcggattgggtatttaaatgcggttgtgcctcgggcgtgtgtacatcaggcacttcgggcgtgcgtgtctcggatatttcggcagagttggtttcctcagtttgttcaatgacttcagcttggctgtatgaggaagaaccctgtatccacgccagcgatttgagcggcatcttcatcttgccgtttttgccgcaggtcaggcagacggccgatccggtgcggtctttgagtacagcatcgactttctcgggcgcgatggttttaccctgtgtttttgcccattgcgcaatactttttttcagagaggcgatgtcaaggttgttcttaccgtaagggtcgcggaaggcggcaagccacaggttgcgatccgcatcttcattgagacccgccatttgatagatgacggaggcgggcgagccgctggcgatggttttggcaaactcgagcgcgtcgggcgatttcatgcggacgcagccgtgactccgaaccccggggacgctggccggcgcattggtcccgtgtatgcccaaaccgagtttggggtcgcctaagcggacaaaaaccggccccaaagggttgtccgggccggcggctatggtttttacgccgtcgccgcgttctttctgtatggatttggggatgtaccaaacagggttataggctttcgcaccgattttatgttcgcctagattggtttgcgtcatcgcccgacctactgcaacgggataaaccttggtcagtttgccgtcggtgtagaggaacaggcgttgctgagggatgttaatgaagacatgttgaccttgtgcgacgggggagacatcgggaatgatggtgtttgcgtatgaaaaaccgcttatcaatagtgcagcagtgcggcagattgttttattcatatcaaaatatggtgtgtgtccgataggttttcggcaaatcatacctgaaaccgtaccaatttgtgcgaaaatatgcgcttcggtacagtgcggacggattgggtaatggcaacggaaacaaatgtcgcggaaatttccgccttggattatgaaggcaggggtgtggcaaaggtcggcggcaaaacggtttttattaaaagggcattacttgattgtttgatgctgggttggttcaggctttaactcaggaatatttacatcataatgaaggtttttaaacaacagcttgaacaactcggcgcgcaaaaccaatatcgttcgattccggatttgattcatcaagggcggtatattacgcgggaaaaccgcaaaatgctgaatatgtcgtctaatgattatttgggtttggcatcagatgaaaacttgcgccggtcttttttgcagcaatacggcggtaattttccctcttttaccagttcttcatcgcgtttattaacgggcaactttcctatttataccgatttggaagagcttgtcgcacaacgtttccaacgggaaagcgcgttattgttcaacagcggctatcacgccaatctcggtattttgcctgctttgacgacgacgaaaagtttgattttggcagataaatttgttcacgccagtatgattgacggcatccgtttgagccggtgtgcgtttttccgttatcgtcataatgattatgaacatttgaaaaatctgcttgaaaaaaacgtcggaaaatttgaccgcacttttatcgttaccgaatctgttttcagtatggacggcgatgtggcggatttgaaacagcttgtccaattaaaaaaacagtttcccaatacttatctttatgtggatgaagcccacgcaatcggtgtttatgggcaaaacggattggggattgccgaacgggataatttgattgccgagattgatttattggttggcactttcggtaaagccttagcctcggtgggggcgtatgccgtctgcaaccaagtattgaaagaatgtttgattaatcaaatgcgcccattgattttttcaaccgcattgccgccgtttaatgtggcttggacttattttatttttgaacgattgccgcaattctcaaaagaaagaagccatcttgagcagttaagcgcatttttacggcgggaagtggcgcatcggacgcaaataatgccgagccaaacctgtatcgtcccctatattttaggcgggaatgaagccacccttgccaaagcggaatacctgcaaaggcagggttattattgcctgcccatcagaccgtcgacagtacccaaaaacacatccagaatccgcctgtctttaacggcagatatgacaacggatgaagtgcggcagtttgcggcgtgcctgtaaggatatgatatggaaacaaaattttacaatcatcaaggcggacatttaatcctgtattttgcaggttggggaacgccgcccgatgctgtaaatcatttgattttgccggaaaatcacgatttattgatttgctatgattatcaagatttaaatttggattttgatttttccgcctatcggcacatccgtttggtggcgtggtcaatgggcgtttgggcggcagagagggcattgcaaggaataagattaaaatccgcaacggcagtgaatggcacaggtttgccttgcgatgataatttcggtatcccttgcaccgtttttaaaggcacattggagaacctcacggaaaacacccgtttaaaatttgaacgcagaatgtgtggcgataaagcatcttttgaagattaccaacaatttcccgcacgcccgtttggcgaaattcatcaagaacttatcgcactttttgcgatgatcgggcaagatagacgtacagatcttatccgctggacaaatgccttggtcggatcgggcgataaaatttttatgcctgccaatcagcaccgatattggacaccgcgttgcaccgttcgggaaattgacgtcggacattacctgttttcaagattcacccattggtcggcactatggaatcactgactgccataaataaatcgcgcattcggcaggctttccaaaaagcattaaacgattatgaccggcacgccttaatccaacaaaaaatgacgattaatttaatgacgcatttgcaagattatttgccggatatgccattggaaaacgtgttggaattgggctgcggctcaggaatgttgagtgccttgctgcaaaaacagatttcagcgaattattggttatttaatgatttgtgcaatgtgcagccccaactggctgaaaaactgccgcaatcctttgatttttattgcggcgatgcggaaaactttccttttcaacgacaatttgacttaatcgcaagcgcatctgccgtgcaatggtttcatcaacccgacgcttttatcacccattgcaaaacaggcttgaaaacaaacggattattggcggttgcaacctttggcaaagacaatttaaaagaagtccgccaaattacaaatataggcttaaattacccgactttatcccaatggcaggcttggttagccaaagattttgagcttttatggtgtgaggattttacggtaatactagactttgatacgccgtcagatgtactcaaacaccttaaatatacaggcgtaacagccacgaaccaaaaaaattggacaagaaaaaatctcaatggatttattggcgattacttgtcggcgttcggtatgccgtcgggcaaagtgcgcctgacttatcatccgttattttttatcgcgcgctactctgcggcgggcaggcaataaggcagcttatgggcaaagttatttttatatcgggtattgatactgatgtgggtaaaaggtaatatggcgaggcttgtgcagaaggcatattgttaaacgttaaattatggtatgatttaaaacttacaagtctatttcagtaaatcgttaataataaaagcggacaatggccgttgcaggcggtcagctatccgctcgttacggtatcgggagtatcctttggaaaactcattaattatcggtttggcactggcggtattgctgatgcttttggttatgcgtgcgaagcagggtaagaaaacaccgaagcgcaaatcccaaggtgtcggcaatacgcaggggcagacacccggaagcaatgattcggactgggtcgatcagattggacaatcggtttcagacggcacgcaacccgactggtcttggaacgaaagtgccgagaccgcatccgccgccgtatccgcgcaagaagtcgatccgcttacggagtatcaggtttataagcaattcggttatcagggcaaggctgccgaatctttggctgcctatctggacggcattccggatggtgaagcgaaacctgaaaaccttatccgcgagctgctcgatatcaatctcgaagtgggggatgtcgatgttttggcagacaatctgcaaaaatacggcaaactgattctttccgaacttttggcaaaatatatcgaacaggcattacagcgcgattcaaaccatttgcgtatccgcgtcttggcggaagaaggtttgggatggggtactcaggagattgaaaaacgtgcggaaggcggttctgcgacggcagcttccgcatcgcccccgccggatgccggcggtaaggcttatgaagccgaagaaatcaagcgcatcccgattgtgcggggcaaaaaagacgtgtccggaatcagtcaagaggaaatcggtgcgattgccggtttggtccgtgccgatcaaggtgcgaaaatccttaaagacaaagtcagctatgaaacggcatcgaaacaatacgaccgtgccatccaaacttccgaaaaacctgcaaacctgattatcgatgcgttgaaactcgattaccaacacgcggacatagaccgttttgccggacatttgtggaaactttaccaaacgttgggcaactacggcaggcaggttaaagagcggatgctggggtgggggtacagcttgggttaccatgaagttttcgatgatttggaaaaagggccgaacgaccggcaaatcaaagacatcggtatggggcacgggtatctgccgaaaaatatacagaaattcaaatcgcaacatcgggatttggtgcttcaagattcttcgttgattaacaccggttcgtctccggcagacgatgcggttaaggaagtagagtcgttgctgatgtatggtcagattgaagcggcaatggatgtgttggagcaggcggtattgaaatatcccgacgagtcccagctttatattacgttgatcgatatttatgaacgtactgaagattgggataggttggggcagtttttaagggtattgagggaacgtgcggacaggcttcctgaagaggtcgttatgctgatgagccggctgctgcagcgtatgaatcaaaatattaaaaaaataaaacggtacggaaaataaaaatggaagttcaactgccgaaaattaaaacagtacgcgtaatgttggcggggatgacggcgcagcaggaatccgttttcaaaatggcattcaaaatgcacaataccacccgttatgaaacagtatccccttcagacggcagtgccgtgcccgatttggttttggcggataccgatgccgagggcggttttgaactttggaaagagcttgccgagcgttataaggatatacccgtcgccgtctgttcggagaaagttcccgattctgaagttccctacctgcccaaaccgattcggtttgaaacattgtttcctatgctccgcaaattgttgcagggcgagaatgtttatgggaaatcgtttattgcacccgcagaccggtcggcgaaaaataacgggaatgtgcagcgtacggttacgatacgccagtttaacccgaataaaggattattgggggcgttgcggtttgcggaaaagaacaggcaggacatcgctatcttgcatggaaataagccggtccttattgttttcccctcgatacaacgggttttgctgacagaaagtgtgcaaaaactcgaagaattgtgcaaagacgaaaatttgcaggtcagctgcaagactgttcccgataacccgcaatggcgcgaaaaggctaaagtaggcattatgtcctgtatgtggcagttttccatttggacagcgcagggcaggttgatttatccgatttctcccgatactccgtttacgttgaaatcttggccaaacctgacccggttggcaaatgtgccggggtcgatacgcttgtcggcatttctgaccaaggcatccgtcaaccttaacgtgttgtataaagtgatgcctttaaacctcaatgatattctgaattatcttgcggcaacctatacaaccgggtttttgtcggtagatttaaaaacggtttcacaacaggcatactccgatatggcggataaaataaatatcggagccgattctgcctctgatagtgaaatgatgaaaaaagcggaaaaaatcacaacaccatcccaatcccagtcgcgcggccttctgcaaaggctgatgaaaaaactgttgggcagctaagaggcggagagatgagagaaaataaaattattttcacaggacctgtcggcgtagggaaaaccactgccattgcggctatttcggacgaagcactcgttcagaccgatgcttccgcatccgatatgactttggataggaaaaggaatacgacagtggcgatggactacggggccatcagcttggatgaggataccaaagtccatttatatggtacgcccggtcaggaacggttcaactttatgtgggaaatcttaagccaaggcagtatgggtttggtcttgcttttagataatgcccgaaccaatccgttgaaagatttggaattctttttacattcgtttcgagggctgctggagaaggcacccgtcgttgtcggtattaccaagatggatatacgctctcagcccggtatcgacgtgtatcacaaatatcttgcaaaacataatcttaatgttccggtttttgaaattgatgcccgtaaggaagatgacgtaaaacaattggttagcgcaatgttattttctattgatccgggactggaggtttaatatggaatcaacactttcactacaagcaaatttatatccccgcctgactcctgccggtgcattttatgccgtatccagcgatgcccccagtgccggtaaaactttgttgcacagcctgttgaaagcagatgcggacgaaatggtcagcagtgagaagctgcttacttgggcggacaccgccgacatcgataccgctttgaacctgttgtaccgtttgcaaaaactcgaattcctctatggcgatgaaaacggtcattcagacggcatcaatttgtcggacgagcaattgccgttgctgatggaacaattgtccggcagcggtaaggcgttattggtcgatcggaacggtctgtatcttgccaacgccaatttccatcatgaggcggcggaagagttggggttgttggcggcagaagtcgcacagatggaaaagaaataccggctgctgattaagaacaacctgtatatcaacaataacgcttggggcgtttgcgatccttccggtcagagcgaattgacatttttcccattgtatatcggttcaaccaaatttattttggttatcggcggcattcccgatttgggcaaagaggcatttgttactttggtaaggattttataccgccgttacagcaaccgcgtgtaaaacttgggagagaggaggggttatgcagcaattattgatttcaatccttgaagatttaaacaatacatctacggatattatcgcgtctgccgttatctcaaccgacggattgccgatggcgacaatgcttccttcacatttgaattcggacagggtaggggcgatttctgccactttgcttgctttggggagtcgctcggtgcaggaactcgcctgcggggaattggaacaagtgatgattaaaggaaaatcaggctatatccttttaagtcaggcgggtaaagatgccgtgttggtgctggtggcaaaagaaaccggcagacttggtttaatcctattggatgccaaacgtgcggcaaggcatattgcggaagccatataacatataaagattgcgggcttgcagataaagtgcaatcgattgtcaatttatattgacacgttcggtatttctgttttattattcgcgcttgttccccgatagctcagtcggtagagcgacggactgttaatccgcaggtccctggttcgagcccaggtcggggagccaaatttcaaaaccctctaagtattttcttagagggttttgttttaccggcggtcagaaacgcatttttgagatgattgttttgagatggaataaaatctttgcaaaattcctttcgtgatggttatgaaaaaataggggctgtcctggacagctaggataaactcgattttatagtggattaacaaaaaccagtacggcattggctcgccttagctcaaagagaacgattctctaaggtgctgaagcaccgagtgaatcggttccgtactatttgtactgtctgcggcttcgtcgccttgtcctgatttttgttaatccactatactaattgagacctttgcaaaattcctttccctcccgacagccgaaacccaaacacaggttttcgtctatttccgctaccaatcactccctaattctacccaaatacccccttaatcctccccggatacccgataatcaggcatccggggtaccttttaggcggcaacaggcgcacttagcctgagacctttgcaaatttgtcggtttcggggtcgtattggtagcctcgtgcctgtatgtcttctttgaaagtttcgtatacgtcgtgggctaaaagggctgttccgacatagggaaccgcccttgtgctgaatttcgcgcctaagcgggcaagtttgccgacccccgccaatacgccggcgcgggatacgctggcggttattttggcgttgattcgggcttttgcgcccgtagggatgtgtgttaaatctaccgtttttattaaatcagatgaataagttttactatttttaggtacaaacttatgaattttcgcaccttgtccggtatcaactgaaacagtttcagatatttttactgcatttgcattcgcttcaaacgaatacatcatcaaaattgcaattatcgacaatttcgcaaaattcaaatttgtatattttatgaccatctttcagggattctttaattaccatttctgaattatcagaaaatgagattagccaaatatcatgtttaattcttctattccagaaaaaagagaaacaatcaataacattttcagacttattaatcttcgcaaattcaacaaattcagattgcgctataaccgccatcgattgcccaaaatacttgctggacggctgatatttataaagtgccaactgcgcctgagtgataaacggcttgttcatggttctgcctttcaatgattgttttgaaagcctgattttgacaccataacttcatgcgctcaattcttaaacagaaccgccccgattaatacgggtacggaaacgccgagataaaaataaaaatccatcatttcaaaacctttttcagcagggaaacaaagtaaacggacgcgaggatgccgaatactatccagcctgtttcaagaccgctttgcaggttgtctttcggactgcattccgccaataaaagccttagcggctgaccgtccgacatcttccacaggctgccgttatattccggcctgacaatctgtccgttttctttgattcttggtactaccaagctgaaataaaggttttcagcctggtgcttctcaagacatttatttccgacttggtagtacatgccgtcttacttcatcactctcttaacgatggaaaatacaaaaagcgcggcgaaaatgcccactacaatccaaccggcttccataccgtccgcttttgcggcttccaaagcgttttttgccgtatcgggcaacgttgcatttgcatgtgcggccaaagccaggggagcagctgttacaacagccagttttgcgccgtatttacggcaggtgttaataaatttcatgatattttccttcaaaaagtgtttggcggtaatggatggagcgtttttcagacgaccgccgaacatccgaaaatcagtctttcaaaaatccgaatacgacaaattcgtattggttgccgatttcttccaaacctgcgttaatcgcttcttcgaagtcgtagaaataatcggcattggtgattaatttggtatgtccgatgtcgcccgtttcaggagagagatacagaaagtcccctgttgatacggactggacaacatagactttctgcattcaatcagcctttcttcacgagttgaaaaccgatgactttcagtttttgggttttgcccgtagtgacgatttctacgttcaggtttgcttcgatcggaaattgggcgtttcggaactgctcgaaattggcagagccgccgaaatcgtattcagtagtagagctgcccaatgcgttgccttgggagctgtctaagggtgtggcgacaatcaggcagcaatagtcgaagctcttgccttcgatttgtccgttgatttttttaacgccgacgatgtggccttgaagttggatgttcattttttggtttccttgtgtgattaaacgtctttcgggcagacactttaagcccatgaaatcggtagtcttgcgaatttgtcgtaaatgaagttgttatagctttcttcattgttgacgtgtttttgctgttcaagctgtttttcaagattctcgtaatattcgtacatatagtaagggtctttgtacggtttgaatgcgggctgttcatgaatggcttgagctttcaaaaaggcgcagtcgtaggcttcgggagccaaagacttgggcagcttgtgatgactcggctcaatcagttcaaacagtttggctttgtccaattcgggaaaaatgaatttcagaccgtttgccgcacgtccgaactgtttttttacccattcaaggtagcggtcggctgaaatgaccttatcttccttaaccgcgtgtatgcgcgttgccttttgggcgaatcgttcgcaaatcggatatgcgccgccgaaatattcgcccggattctgcaaaacttcgaaagggataacgatgtcttttgctttgaattcaatttcaaatcgcgtccatgtgcttgttttatcgcccaactgcttgcctttttcatagacgcggacatatttggacgattcacgggagccgataccataggtcttgcctttggtcattttggcttcatcgtcttcttcccaatctgaccccaaacattcgccttttggtttgacgtgatgacaggtaaacatacctttatttcggtcttcacgggcttggttcgggctgtattcgccgttgaaaaagtcttttgcgatgtcaacgcgtgtgatttttgggcggattgcattagtcaggaatgcgaaaagtcgtgattcccagccttcttttgcgacgccgcaaccggtgccggtcagttcgaaaagaatggtattttgttggccgccaaaatggacgcgaccgtatagggcgtcttccgaacccatcaaccaacagcgctcatagaaacgaccgcccgaacctttggattctttgtagataccgaaaccgaaaacttcttcggcgagcatggacgcggcgcgaataaaatcttcgtcttccaaaagacttacacgaacgccgtatttatcgaaaaaggttttttcatgaaatgaaaagctaatttgatcaatgaaagccgaatctgatacaccgcgccgaagaggaacgcctaacaggtttcctttaccgtccgttatgtacgtttcgtaacattcgaagacttcctgaaccctgcctgccgtttcggtttctgtccccccctgttagataaggggggaagatttgaagcggttgtcggcttcctgccgtccgctagcgcgtccgtcatcacgccggcaaccgcctttgtcatcccttgcttatcttccatggtgcgaatcctcaaaaacgggcaaaaaaaagccctgttacttgtagaaagtaaaggacgttaatttttgttaatcgtcccttcttagggacgcaatatataaggccgtctgaaacggtttttctgtttttagacggcctcttggcttagaccttgagaaccgcatgcgtgcttaatttattatctaatgaaaaaagtttccggctttcagacgaccttttgtaatattatcggcagcggctcaatgccaactttaaacctgctccgatttcttcagggctgttatccaatgataaaattacatcgtctgcatcaatggcatcccacgcttccagcttgacatggcggctcgggctgattttcaggcagccgttgtgcagccaaatatctacgctcatcatgtttttaaatagggcgcgtctggttttatagcccaagttcccgcatagcttggcaacccaatcctcatagcgttgccgaattttttcggtatcaaaaaaatcttggtcttctggactgtcataaacgaaagtcctgctgtttgccaatgcttgcaagaccgttgtgcctaaagtttcattgtcggtatccaatggcaggatatgggggggatataggtggtctggagcatatcgcccaaatcctgaccatgtttgaataatcaaggctctttcatttgccttatagccagcccaataatcttgttcttgattgaaagtcatttattcgatctccgtaattttgactgtaatgttttgacttttgccatactctaccacacgttgcaactgcaatctttgctccttattagtttgtgcgggtatggccagatggatttcgcgctgtttgatcatgtctgcccttaacggtacttctgataattcataacttttgaaatttgccgtcttatcgatgtaccctttcatggtactgtaaagctgttcgggtttggacaggcgtgccgtagtttgcgtatccagagttttggcactgattgccgtgcctgtaccacgatcaaaataatcaaatgttttaaaatttttaggtaaccttgcattggcagacaagcccttaccgacataatcctcccaaggcattccctgtccttcaatccccttgccccacttgataccgacttcggattgggacaggatatttcgctgtacgtcagcagttttcggagtcaaggaagttttcacacccgttgccaagtttcccaatttgcgcgtaatcagcgtttccaatccccatacggctagatttttcgcatcagatactaacggcgattcgtattctattggtgtacccaaagataggacaacttttttaccaaaatcggactggtaagtgccaaacaattgccggcttccttctgaggcctgtgtataaccaccggtcatacctgccgttgcaataagtccaccggccgcacagccaatcccggtactgcacagacctccgcctatagcacccgaaccgacaaaagtcgttgcacccaatcccatattgcccgcacccttaattttggtggcagcacggtcgtaactgctgcgtatatcattcaggctgttccatgttccatatttaaatgcatccgtccgcatcaatacgttttgttccgctacaaactgtttaccggcatcttggaggttttttagtcctttataaagagggtcgaagtcaggtacgccttccgcgcaccgggttaatgcacatgcagcggcttttaggcggtactgttcttcagccgatttgccttttgacagtttgttaaggatttgtgtttctttcggatgcagctgcctattgttccaatcgacattcgcccctactgccgccgtaccgacattcccgcccgccgcatagccgattgccgccccgccccgtgcagtatgctcctgcctatgccgccttctttccaggtgtcgtagcggctttggttttcggcaagataggcgtttacttggccgagggatgcgcggaaggcggctttttcggcttcgctgtccgtgttttgcagttcggcctccagcagggttcgggcttcctgataccgttcgtaactttgggtattgccgagtttgtcggcaacggccgctacggcttgggtggcgtttctgccgaactccttcgttacttccctttgcaggttgatctctttggcgaccgcgtctttgtcgaagctgtttttcagacggcctgagtgttgatccgcagtttcggtgtcgatgccggtgtagatacgcgcttcggtttcttttgcagtcctgcctgttcgggcaagttgtcccgcttcgtcggtgatgtgtatgttgcgggtgttgatgccgcttttcgtgatgctgctttgactgtcgctgtcgctgccgtagccggctgccaggcttatcctgtcggtaggtctgccttgtttgtcggtaaccgtgccgtcccagccgccgttcaggtcgaaactgccgcctatgccgaagcttttgccttcgtagcggctgtggttttgaatgtcgctatgggtgagggtggccgtctgaaaaaggtttttgcccttatcttctgcgctttggctagacgtgatgataccgcccttgaggtctgtgttgtctctgactttgatttgatagccgtcttctccggcataaataccgctttgctcggttaccgaagcatggtcggctcggattttgctttggctgtaatcgccactggcactgaagccataacctacggtcacttgtgcactggcgttttgttgtttgctttgataggtttcagtatcttgaacactttctatatgcaggttgcgcgtatctgcctgtatgcctttgccgatgagctgcgcacctttgagggtggtatccccgccgcttcgaatggtagttttaccggttgtgctgccgacatgggtgtggcggtgggttgcttttgtctgattgctgtggtggcttgttgaaagaaaggctgtctgaaacgtatttgttgtttcagacagcctcctggctcaaaccttgaaaactacatatgtgcgttccgcacatcctacgtattgagtttaggtttcacatgagctacggcttgctatgccgtcttttttccaggtgtggccgcggctttggttttcggcaaggtaggcgtttacttggtcagatggcggattttttgttcgtcgtagatgatggagacgctgataccggagtaagcgtagattgggtcttgacctcaaacctacacttgttttacataaaatttcgtgtctctatttgaaaaatctaaataacaacattctactttacctattgaattgattatagttgaaacaggaatattaagaagcctaatacccaaatcatcaatttcaaaatcattaattccactcttataaagatagcttattatttcatcattaatttttccaagccaattaaaagaaatatcttctaaaaaaaacttatttggttcaaatatctctatcgcttcaagctgatttttatcatcataaaaacaatggatattcaattcgggaaaaacatccataggaacccgagagtatgatgacttataaatttcttgtacatcagaactaaatattgcacgaacttgttttcgattcagatttgatgagataatatttctttctattttttttgaactaaaataaaaaattgccataatttttttgcctaaacaatattaccattttcgtaagatgcatagaacaaaccatgtcttatccattttgttccatcggcagacagataacgactatatctaaattttatttttcactctcataaaaaattttctgcaatattcaatatatttactttcttaaccatagcgtaaattcctcaggcttatatatttcagtataagtatgacttaaaggatatgacgccgcgtgttacgagttgcttcttttgatttcagggtttatataagttatggcttgcctgggctcgaagtgataaagagagtatttacttttcaactataaaaatatgagatagttccatgggaaaaccgtaatttaagttttaataaagcaccttctaggcgatataaaaattttctataattttcatttggtttatatttatatataagctgtatttcaatagtctcatagctactttctccaaaatcttcaaaaatttgacctgattcaatatattgaatatatgaatttattttttcttgcaacaaaaacaaatgctcgttatcccattttaagtgatcagaaatagttaatatgagtattccgttttcaatagaggctgaatcaattacattctcttccaaaatagacattatcttttcctttcaattataactttagtaggttcaattttggtcccctttggatagcccggttttcccttaccgaccactgttgctcccgttctttcaatttcaggaaaagcttttttctgatttttagtaagtggcgcagttattgaagccttacactctgtacaaacatcaagaccaccttctttcgaaataatatcaagcctagtttttacaccactttttgttttaactgtaatctgtctttgcggtttaaagccttgtttaactttcttctgataaatttccatctcaaaatcctcaccagattttttatttttttccagttgatctttacgatttttatgtttgattcccttgctagccaatgccgtatccggaatcctgtcccccttcgcaacattgccgtttgcagggatacggatattccccgcacccgccaataagggatcgctgccggtaactgtcggcttgatgtttttcaggttgcggatgcctgcaagaatcgggacttttatcctcggattggggttgacaaggctcgtcagtccttcggcaacgttcagtgcaaactcttcgtttttccgctctccctgcctgattttggtgtctttcgtcccgctgtgcagccaggtcaggttgcggtattcgggtttgtcctgtcggcggtattcctcaaacagcttcggatcgttgtaggtttgcggatttcttgcgccgtagtcgcggtagtcccaagtataacccaaggctttgtcttcgcctttcattccgataagggatatgacgctttggtcggtatagccgtcttgggaacctttgtccacccaacgcagtatctgcctgcggattctcattgccgcttcttggctgctgatttttctgccttcgcgtttttcaacttcgcgcttgagggcttcggcatatttgtcggccaacgccatttctttcggatgcagctgcctattgttccaatctacattcgcacccaccacagcaccaccactaccaccagttgcatagccgatggccgcaccgcccagtgcgttgaccgccgctttgcccgccggaccgaggttttccgccgctttgtccaaatacggtgcggcaagggaagtgccgccgccggccagtatgccgccgaggctgccggtcgtcagtccgcctgccgccccgtgcagtatgctcctgcctatgccgccttctttccaggtgtcgtagcggctttggttttcggcaagataggcgtttacttggccgagggatgcgcggaaggcggctttttcggcttcgctgtccgtgttttgcagttcggcctccagcagggttcgggcttcctgataccgttcgtaactttgggtattgccgagtttgtcggcaacggccgctacggcttgggcggcgtttctgccgaactccttcgttacttccctttgcaggttgatctctttggcgaccgcgtctttgtcgaagctgtttttcagatggcctgagtgttgatccgcagtttcggtgtcgatgccggtgtagatacgcgcttcggtttcttttgcagtcctgcctgttcgggcaagttgtcccgcttcgtcggtgatgtgtatgttgtgggtgttgacgccgctgcgggtggtgctgtttttgctgtctccgtcgctgccgtagccggctgccgggcttatcctgtcggtaggcctgccttgtttgtcggtaaccgtgccgtcccagccgccgttcaggtcgaaactgccgcctatgccgaagcttctgccttcgtagcggctgtggttttgaatgtcgctggcagtaagggtggccgtctgaaaaaggtttttgcccttatcttctgcgctttggctagacgtgatgataccgcccttgaggtctgtgttgtctctgactttgatttgatagccgtcttctccggcataaataccgctttgcccggttacggaggcatggtctgctttgactttgctttggcggtaactgccgcttgcactgaatccgtaaccgacagtaacttggacattgccgttttgctgtttgctctgataggtttcagtatcttgaacactttctatatgcaggttgcgcgtatctgcctgtatgcctttgccgatgagctgcacacctttgagggtggtatccccgccgcttcggatggtagttttgccggttgtgctgccgacatgggtgtggcggtgggtagtacttcccccttgctctttacctttaccgatatttcctccggcggtaattccaaacctgatgccgttgcctattttgacggctacgcctgcattccaaccactgcttttgtttttgctttgctcgctgccgtcctgtttggcagattggagtctgatatggttgtcggcaatgagggcagtacctgcatggccgatgacatcggaacctgtaatattgatattggactgctccccacttcctgttgccgcaagtgtggtttgccctttgccgataatttgacttgctgccgcttcggtgtaatgtcttttttgctcgttacgacttttctgttcgccgtaggtaatggacacactgatactggggctttgattgttgttttgaccttgtcccgcactgctgcttggagcaaattgttgcatttgttgggttgcttgataactctgccatgcagcattggctgcagccatggcattaacgcgtttatttttacttttgcccacattttgggctgcttgtatgaagttttgtgcagcttggacaaccgggacattgagggcgacggtaaggcctttttgttcctgggtatgggcgtagtcagtggcataccggttgtttgcgaactctacatctatgcttttggctgtgacggtattgcgcccctcggggctggagacggtactgccggtttgtcggtagcggtttcctgcaactgtaacggtgtctccattcaggctgcctataatgctgcctgtatggacaatattggtacgatcagtgtcatcggtagttttccggttaccgatagtaaagcccaatccgccagtacccatgacgcctgattttttgctctcgtggtattcattgccggtatagcgattatgggcagtagaaatatcgatgtcgtgtcctgcttttaaaacaatgcccttatcagaaataaggttgctgccgcgtacattgatatcctgcccggctgcaacaatcattttgccgccgccgatgttgctgccgactgcttcatcatgactgaagcggtagcggtcgtgtgttttggtactggaaaggatgcctttgctttttccgcttaccgaggtatccagttcggttatttggcgtccttcgctgatagtgacatcacgtcctgcggcaaggacggttttgccttcttcggcctccagttcgccttggcggatttttaagtcgttaccggctctaagcagtgcgccgttttgcgtgcggatactgctgccgacttcggtactttggcggacatggcgatggttctcgtcatctaatgtaccataggcttcgcgatgttcggtacggatggtgccgaggttgagattattgccggcggtaatttgggtagtgccgtctttaacttggttagagacggtggccgcattgaggttgatatcgttgctggcatgcagggataggatgccgtctgaagttctgttatctacttgttcagtatggcttccgaccacgttaatgccggccatacgatcgatggcggtattgccgttacgttcattaccggaagtttgggttgtaccgttaaggttgatattttgcgcttgggcagtcagcagtctgcctgcttgtacctgcccgccgtcgatattgatacttttttcagcttttaagccgatttggtcggcttgaatgttaccgttgctgttaatattccgtgcctggatgagtacggcctgtcgccccgcaatggtaccgctgttagtcaggttgccgttttgcagtttaagtaagacttgttcggcactaatcaggccaccggaggtattgagatcacctttgcgcgccagggcatagactttaggaaccagtacggtttgagtcgaaccgtcagacagggtgacggtttgattttccatccaaacgatatctgaagttaagcgggcaacttgctctgcactcaaggcgatacctggggtgagaccgaatgttttggcagcagtaaggccgttgtccatcagagctttgaattgttcttcatcactcctgtagccgtcgagtcggcggtagcctgttaactgatggatttgttcattaacaagtttttgttcgtagtagccgtcgccaagccgtttgtgtagatgattggtgtccaattgcagttgttgcaacatgtagtcgctgcccaaccagcggcggtagtctgcaaattgaggatcggtttcaaccaaccagcctttattgtcaggatgggtggtatagaggctgctgttaggcagagtaacagtagcgttatttaacgagaccacattaccggtatggatgcgctgaccattgacggctgccgtggatactccgtcaatcagtttgattgcagatgcggcgggttgaaaggaaggggaggcggcattctgttggatgacggatacaggcgtgtcgaagtcgtgggtaaatagttgggtatcatggtaaggagtatggtttctttcagtacggcgttgtctttttctaccgctgtaccatcctttttttgtaactgaatcccactgtgtgccgacagcatctgtgcgacctttgcctgttgtactttgattggtaatttctttctggtttaaatcatcagtgataatacgcccgcctactacaatccggctgtctttgttcagccaattttgacctgaggcagtcaaatcaccgcccacagtaatgtgtgccggccggttttcgatgatgcgttctttataagtctcgatgtggtagtctcggacatgccattggttggcctcaatacgagaaccattttttaaatggaacgtagcagtagtttggtctttttgtccttgcgagttgtcgaataaaccgtcttttcccgcctgatagtaggtattttgccccagtacggtgtagtcgcggacttgcttttccgctttggctaagtatgtctctgttttaaagtgattattgatattctgcatattccgaacggacatcaatgcatcaccttgtacttccaaaccggcactgccattaacaaaggtatcggccatgcctgccgcatgatgttgttcatccagtcgattacctacggcaaaaataccttcgctggatagtagggcaccttcttggttatgaatctctttcgctccaatatccaaacgtttccttgcagctattgcccccgctttggtactgccttccgtcgtttcttcccggttaagcagtatttgcgcgtccagggcaatatggttgccatagattttgcctgtcccggtgttggtcagggtttgacctgcaccgatgtgggtcaaaccgtcgctgttgatcaagcccctgttgtcaacatgctgttcggatgtgatgtccgtttgttctccaccaataattttgcctgtaacttggttatctatattgccggcattgagtttgagcgtatggcctgcttgtagggtatgggtatttttcagacggccttttatgcttagatttaattgtttgcctgcagtgaggtcgcgctctacgacgaaatcgtccgtcaaagcaatatccagtttgttaccggctgttaatgtgccattgttggcgagtgatttggcttgtagcgatacattaccggcagattgaatcgtgccatccgcattgtttaacgccaaagtgttttgatttttatcgtgaatagacaactgccggttggtggcaatttcaccatgttggttgtataggccgtctgaaacagctaattgtgcttggtttgcagataggagtttgccgttttggttgtctacatttcgactattgatagtcagttgttcggtagcagtaatatggccgctttggttagtcagttgctgactttggatgttaaccgtttcagcctctatacgtccgcgcgtattatctagagtctgaccttcggtattcagtcgtgcaacagaaacttttcctgtattgcgaagattattcttggtggtaacggttccactatcggcaagaatgttacctgcattatgtaaaccggcggtatcaagctgtaaatgtgcagctcgaatattgccttttttatcattgctcaagcggcccgaatgaatgagtgtcagattgttggcggcaatttctccggcattatgcagttcacggttatcaatcttgccggtttgagttaataagtgaccgctgtttttagcagtttgagtgttaacagccagatcgtgtgcctggagtttgccttttaccgtattgttaaatgaatcgcctgatactcgtagtttagccgcattcagactacccgaatttcccaaaccgttttgggcggcaatgtcaatttgcccacccgcattaattgatcctgcattgtcaaatgctcctgttgtttgaatgcgtcctacggcgtagttttttgcaggtgctgtaggtgaaacgggattgtttgaaccaggcttagataccgagacagtgctgctgcctgaacctgttgcagtactcggaatctgtggtatgactgatggattgggattcaaaccggtctgtggaacgtcacttacaccaatcttgccactgttatcgaatttgccggcagataccaaatccaatgcttgtgaacctgtttgagtaatattacctgtgttatccaaaccacctgttgacatatctaagcgggcagcctggatcgtaccgttgttttggtttttcagacggcctaaattacgaacagtcaatcgacctgaggataagaccgtacctgaattgtccagcgtctggctgtgaatattggcatcatcctgtgaggcaaccgtaccgctattatgaacattgcgggcatgaagtgaaaccgcatgattttctcccgtcgctgcaatcatgcccgtgttgaccagtttaccctcagcattcactgccacattgccggctgaggcaaaccattgcccttgattacgaatgcctgcttgctcgaccgtactgatcaaggtgattttgttggcatacatacctcctaatttgcctgtatcaatcgcaaataaagggatatgtgtgccgttgttggctgtattgtttgacgtattggcagcagcattattgagaataggcgaatgtgcatcacctgttgcggccacatcgttttgtcccgcgacgacacgaacatcttgtccccatacgggtgcatcaattttggaatgataactgagaatacgtgtgtaatcggtatcacgtgcatccaaaccgtgtccggcgattacaacattgccttgccttatcttaaagccgctaaggtctcctgcttgatattgcggttgggctgtcgtcaaagtggcacgggaagcattgataaaaccaccaccattgactgcaatccctgccggattggcaataacgacttctgcacgtcgtccgcccacttcaatatagccattcagttgtgaagaatggctgctgttgatttggtttacaaccacacgtgcttcgccccttgccaaccaaggattgccttgaatccaaccgcctagctgtgtttgggtgttgctgcgactgttgtttaaaatcgccccgcgattacccacatcaaactgggcgtattgattaacagaaacccctgccgaagtaggggtttgaatattgacttgcggtatgccgttacctgtttgcaggatggtaggctgttgctgtgcaggtgcggatttgtcggcaacgataccttgggcagtagcagaagaagaagtcaggataagggcagaaccgagcagtaatgaaagggagaatgagataacagagatagaatggataaaacccgcaaagcccgcaatatcatttggcaaaatacctacagcttgggtgtcggctgtgtttttgccctcgcgtttggcattttcagcaacggctatcatgcagtttcgatgtttgttaaatacaactttgtacagggtgcggttcatagtaagggctttcttaataatatttttataatcgtaaattagattaatttttaggggctgacgtagattaacagttatgccaggctacgaaaataaagataaccaattgtaaattaaacaatagagttcaaaagaaactgcttgaatttttcgtactccaagctaccgcccgttccgctgccgatattttgggtatggcgctgcgggcaatttccgttcccacttcggcgagttggcgcataatggaacgctcgcgcacgatttcggcatggcgccggatgttggcggcagacggagtattttgcgccagcgtaatcagatattcgaatccccccgccgcttccagctcttcgttccgctgcaaatcttcctgaaccgtgatgacatcggcaggacggctctcattgatcagtttggcaatggatcggaaaatcaggcggtgttcgtggcggtagaaatcctctcccgaaaccacatcggcaatcctgtcccaagccggattttccagcatcaacccgcccaaaacggattgttccgcctccattgagtgcggcggaagcgataatgagccgattcctccgtcttcagacggcatggctgtgtaatcgttcatggtacatccgacaaaattgcaatcttctattgtagcgtaaagcaggttcaattggtttccgtaccgcaaaacaggtagaatacgcgagttgccgggttaaataccttcctcaaccatcacagttaacataggaaataatttggcaatctgagaatcggctatccacctgtttgtcccttcagtcctaagcatacctgaatctttaacccaaattgttccatccttgtccttaaaacgtgtgccattagaaatcttttcccattcgtttaaaacgacttttgcatttttgttttcaggatttttggccccattatctttagccacatcttcaaatccccaacgttcctctacggcttttttcagaatattcagcctatgggctttagtcacgttctgaccttttgcaatgagcgaagcgatatatgcttccgccctgacccgtatcgttccggcttccaaatcagtcattccggcaaaaagttccgattgattttcaagagggatgtctttcgaccctattttatgtaggattgagaatgtaaaacctacaatttttcgtccttctttatgctgctcgtaggtaatggaaatatccgttttatcattgatctgcttgacggcgaaatccaaaaccttacgtttgaatagctccattttttgatactcgtcaggcatcatacccaaacgttcgcgcaactccattgtactgaacatcggtgtcttaccggctgcacgccatgaaataataatttcgtagagccgcaccgcgtatttactgctcaacgatgagacctgatcaagctcgtagcttgtgaagtttttttctagcatcgtaatcaaaggggcaacatttggtgcaaaaactaactctaccgttgcctgttgttcaatataggcgacttgagatacccaccttgtccgtactaccttttccccttttggtgttttttcgataaaactgaattggcgttcaaaaaggttgttacaggcatctttcaaagccttatacgccgtattacggttggtatggaaattattaacgatgcagaacttatccgttccatgcagcgtcagcagcacatagatgctgaattgttaactgatgcaaatgtccgtttcgagcaaccattggagaagaacaattatgtcctgagtgaagatgaaacaccgtgtactcgggtaaattacattagtttagatgataagacggtgcgcaaattttcttttcttccttctgtgctcatgaaagaaacagcttttaaaactgggatgtgtttaggttccaataatttgagcaggctacaaaaagccgcgcaacagatactgatcgtgcgtggctacctcacttcccaagctattatccaaccacagaatatggattcgggaattctgaaattacgggtatcagcaggcgaaataggggatatccgctatgaagaaaaacgggatgggaagtctgccgagggcagtattagtgcattcaataacaaatttcccttatataggaacaaaattctcaatcttcgcgatgtagagcagggcttggaaaacctgcgtcgtttgccgagtgttaaaacagatattcagattataccgtccgaagaagaaggcaaaagcgatttacagatcaaatggcagcagaataaacccatacggttcagtatcggtatagatgatgcgggcggcaaaacgaccggcaaatatcaaggaaatgtcgctttatcgttcgataaccctttgggcttaagcgatttgttttatgtttcatatggacgcggtttggcgcacaaaacggacttgactgatgccaccggtacggaaactgaaagcggatccagaagttacagcgtgcattattcggtgcccgtaaaaaaatggctgttttcttttaatcacaatggacatcgttaccacgaagcaaccgaaggctattccgtcaattacgattacaacggcaaacaatatcagagcagcctggccgccgagcgcatgctttggcgtaacagacttcataaaacttcagtcggaatgaaattatggacacgccaaacctataaatacatcgacgatgccgaaatcgaagtacaacgccgccgctctgcaggctgggaagccgaattgcgccaccgtgcttacctcaaccgttggcagcttgacggcaagttgtcttacaaacgcgggaccggcatgcgccaaagtatgcctgcaccggaagaaaacggcggcgatattcttccaggtacatctcgtatgaaaatcattactgccagtttggacgcagccgccccatttattttaggcaaacagcagtttttctacgcaaccgccattcaagctcaatggaacaaaacgccgttggttgcccaagataaattgtcaatcggcagccgctacaccgttcgcggatttgatggggagcagagtcttttcggagagcgaggtttctactggcagaatactttaacttggtattttcatccgaaccatcagttctatctcggtgcggactatggccgcgtatctggcgaaagtgcacaatatgtatcgggcaagcagctgatgggtgcagtggtcggcttcagaggagggcataaagtaggcggtatgtttgcttatgatctgtttgccggcaagccgcttcataaacccaaaggctttcagacgaccaacaccgtttacggcttcaacttgaattacagtttctaacctctgaattttttactgatatttagacggtctttccttatcctcagaccgtcaaactttacctacgtacttggcgcgcagtacgttcatcttcaaaatggaatagacatgaataaaggtttacatcgcattatctttagtaaaaagcacagcaccatggttgcagtagccgaaactgccaacagccagggcaaaggtaaacaggcaggcagttcggtttctgtttcactgaaaacttcaggcgacctttgcggcaaactcaaaaccacccttaaaactttggtctgctctttggtttccctgagtatggtattgcctgcccatgcccaaattaccaccgacaaatcagcacctaaaaaccagcaggtcgttatccttaaaaccaacactggtgcccccttggtgaatatccaaactccgaatggacgcggattgagccacaaccgctatacgcagtttgatgttgacaacaaaggggcagtgttaaacaacgaccgtaacaataatccgtttgtggtcaaaggcagtgcgcaattgattttgaacgaggtacgcggtacggctagcaaactcaacggcatcgttaccgtaggcggtcaaaaggccgacgtgattattgccaaccccaacggcattaccgttaatggcggcggctttaaaaatgtcggtcggggcatcttaactaccggtgcgccccaaatcggcaaagacggtgcactgacaggatttgatgtgcgtcaaggcacattgaccgtaggagcagcaggttggaatgataaaggcggagccgactacaccggggtacttgctcgtgcagttgctttgcaggggaaattacagggtaaaaacctggcggtttctaccggtcctcagaaagtagattacgccagcggcgaaatcagtgcaggtacggcagcgggtcgcactgggcggtatgtacgccgacagcatcacactgattgccaatgaaaaaggcgtaggcgtcaaaaatgccggcacactcgaagcggccaagcaattgattgtgacttcgtcaggccgcattgaaaacagcggccgcatcgccaccactgccgacggcaccgaagcttcaccgacttatctctccatcgaaaccaccgaaaaaggagcggcaggcacatttatctccaatggtggtcggatcgagagcaaaggcttattggttattgagacgggagaagatatcagcttgcgtaacggagccgtggtgcagaataacggcagtcgcccagctaccacggtattaaatgctggtcataatttggtgattgagagcaaaactaatgtgaacaatgccaaaggcccggctactctgtcggccgacggccgtaccgtcatcaaggaggccagtattcagactggcactaccgtatacagttccagcaaaggcaacgccgaattaggcaataacacacgcattaccggggcagatgttaccgtattatccaacggcaccatcagcagttccgccgtaatagatgccaaagacaccgcacacatcgaagcaggcaaaccgctttctttggaagcttcaacagttacctccgatatccgcttaaacggaggcagtatcaagggcggcaagcagcttgctttactggcagacgataacattactgccaaaactaccaatctgaatactcccggcaatctgtatgttcatacaggtaaagatctgaatttgaatgttgataaagatttgtctgccgccagcatccatttgaaatcggataacgctgcccatattaccggcaccagtaaaaccctcactgcctcaaaagacatgggtgtggaggcaggctcgctgaatgttaccaataccaatctgcgtaccaactcgggtaatctgcacattcaggcagccaaaggcaatattcagcttcgcaataccaagctgaacgcagccaaggctctcgaaaccaccgcattgcagggcaatatcgtttcagacggccttcatgctgtttctgcagacggtcatgtatccttattggccaacggtaatgccgactttaccggtcacaataccctgacagccaaggccgatgtcaatgcaggatcggttggtaaaggccgtctgaaagcagacaataccaatatcacttcatcttcaggagatattacgttggttgccggcaacggtattcagcttggtgacggaaaacaacgcaattcaatcaacggaaaacacatcagcatcaaaaacaacggtggtaatgccgacttaaaaaaccttaacgtccatgccaaaagcggggcattgaacattcattccgaccgggcattgagcatagaaaataccaagctggagtctacccataatacgcatcttaatgcacaacacgagcgggtaacgctcaaccaagtagatgcctacgcacaccgtcatctaagcattaccggcagccagatttggcaaaacgacaaactgccttctgccaacaagctggtggctaacggtgtattggcactcaatgcgcgctattcccaaattgccgacaacaccacgctgagagcgggtgcaatcaaccttactgccggtaccgccctagtcaagcgcggcaacatcaattggagtaccgtttcgaccaaaactttggaagataatgccgaattaaaaccattggccggacggctgaatattgaagcaggtagcggcacattaaccatcgaacctgccaaccgcatcagtgcgcataccgacctgagcatcaaaacaggcggaaaattgctgttgtctgcaaaaggaggaaatgcaggtgcgcctagtgctcaagtttcctcattggaagcaaaaggcaatatccgtctggttacaggagaaacagatttaagaggttctaaaattacagccggtaaaaacttggttgtcgccaccaccaaaggcaagttgaatatcgaagccgtaaacaactcattcagcaattattttcctacacaaaaagcggctgaactcaaccaaaaatccaaagaattggaacagcagattgcgcagttgaaaaaaagctcgcctaaaagcaagctgattccaaccctgcaagaagaacgcgaccgtctcgctttctatattcaagccatcaacaaggaagttaaaggtaaaaaacccaaaggcaaagaatacctgcaagccaagctttctgcacaaaatattgacttgatttccgcacaaggcatcgaaatcagcggttccgatattaccgcttccaaaaaactgaaccttcacgccgcaggcgtattgccaaaggcagcagattcagaggcggctgctattctgattgacggcataaccgaccaatatgaaattggcaagcccacctacaagagtcactacgacaaagctgctctgaacaagccttcacgtttgaccggacgtacaggggtaagtattcatgcagctgcggcactcgatgatgcacgtattattatcggtgcatccgaaatcaaagctccctcaggcagcatagacatcaaagcccatagtgatattgtactggaggctggacaaaacgatgcctataccttcttaaaaaccaaaggtaaaagcggcaaaatcatcagaaaaaccaagtttaccagcacccgcgaccacctgattatgccagcccccgtcgagctgaccgccaacggcataacgcttcaggcaggcggcaacatcgaagctaataccacccgcttcaatgcccctgcaggtaaagttaccctggttgcgggtgaagagctgcaactgctggcagaagaaggcatccacaagcacgagttggatgtccaaaaaagccgccgctttatcggcatcaaggtaggcaagagcaattacagtaaaaacgaactgaacgaaaccaaattgcctgtccgcgtcgtcgcccaaactgcagccacccgttcaggctgggataccgtgctcgaaggtaccgaattcaaaaccacgctggccggtgcggacattcaggcaggtgtaggcgaaaaagcccgtgccgatgcgaaaattatcctcaaaggcattgtgaaccgtatccagtcggaagaaaaattagaaaccaactcaaccgtatggcagaaacaggccggacgcggcagcactatcgaaacgctgaaactgcccagcttcgaaagccctactccgcccaaactgaccgcccccggtggctatatcgtcgacattccgaaaggcaatttgaaaaccgaaatcgaaaagctggccaaacagcccgagtatgcctatctgaaacagctccaagtagcgaaaaacgtcaactggaaccaggtgcaactggcttacgataaatgggactataagcaggaaggcttaaccagagccggtgcagcgattgttaccataatcgtaaccgcactgacttatggatacggcgcaaccgcagcgggcggtgtagccgcttcaggaagtagtacagccgcagctgccggaacagccgccacaacgacagcagcagctactaccgtttctacagcgactgccatgcaaaccgctgctttagcctccttgtatagccaagcagctgtatccatcatcaataataaaggtgatgtcggcaaagcgttgaaagatctcggcaccagtgatacggtcaagcagattgtcacttctgccctgacggcgggtgcattaaatcagatgggcgcagatattgcccaattgaacagcaaggtaagaaccgaactgttcagcagtacgggcaatcaaactattgccaaccttggaggcagactggctaccaatctcagtaatgcaggtatctcagctggtatcaataccgccgtcaacggcggcagcctgaaagacaacttaggcaatgccgcattaggagcattggttaatagcttccaaggagaagccgccagcaaaatcaaaacaaccttcagcgacgattatgttgccaaacagttcgcccacgctttggctgggtgtgttagcggattggtacaaggaaaatgtaaagacggggcaattggcgcagcagttggggaaatcgtagccgactccatgcttggcggcagaaaccctgctacactcagcgatgcggaaaagcataaggttatcagttactcgaagattattgccggcagcgtggcggcactcaacggcggcgatgtgaatactgcggcgaatgcggctgaggtggcggtagtgaataatgctttgaattttgacagtacccctaccaatgcgaaaaagcatcaaccgcagaagcccgacaaaaccgcactggaaaaaattatccaaggtattatgcctgcacatgcagcaggtgcgatgactaatccgcaggataaggatgctgccatttggataagcaatatccgtaatggcatcacaggcccgattgtgattaccagctatggggtttatgctgcaggttggacagctccgctgatcggtacagcgggtaaattagctatcagcacctgcatggctaatccttctggttgtactgtcatggtcactcaggctgccgaagcgggcgcgggaatcgccacgggtgcggtaacggtaggcaacgcttgggaagcgcctgtgggggcgttgtcgaaagcgaaggcggccaagcaggctataccaacccagacagttaaagaacttgatggcttactacaagaatcaaaaaatataggtgctgtaaatacacgaattaatatagcgaatagtactactcgatatacaccaatgagacaaacgggacaaccggtatctgctggctttgagcatgttcttgaggggcacttccataggcctattgcgaataaccgttcagtttttaccatctccccaaatgaattgaaggttatacttcaaagtaataaagtagtttcttctcccgtatcgatgactcctgatggccaatatatgcggactgtcgatgtaggaaaagttattggtactacttctattaaagaaggtggacaacccacaactacaattaaagtatttacagataagtcaggaaatttgattactacatacccagtaaaaggaaactaactaaatatgagtaactttgaaaaaaaatatattttagaattaaatgatgctttaagccatttaaatcataactctacctcatttgatttattgaaagttttgatttcatggttatcaaacgatattgtcattgataaatttaaaattttaggttatgactttagtaaatatatcgaaatgaatcccgatgactatccggttgaaaaatctatattgaatagagaggaaattatttatctcaaaaacaatatttatcgtaaaatatcatcaggaaattttaaatttcaatactttgtacaatatattagagatattttagaatatttatttattgaacatattgaaagagtctgtccttactgcgaatggggtgaaatgcaaaaattagaagaacaaaatacgcatgaaacggtgtatctctgtactcaatgtggatgtgctttttataacgataattcacaatttttattaaaaacccctttaaccattccaatgaaacgtgatgaatttaaataaacaagccgtagcctgcatgaaccctaaaatccacgtgtagcgtgtgtgcgccagcacgcatgcgttccatgatttacggctcaatgccgtctgaaaagctcacaatttttcagacggcatttgttatgcaagtaaatattcagattccctgtatgctgtacagacgcgggagtgttaagccccccttgtttgaagctccgcggctcctgccgagcttcaccgaccccgttgtgcccaagctctctgctcccggcggctacattgtcgacatccccaaaggcaatctgaaaaccgaaatcgaaaagctggccaaacagcccgagtatgcctatctgaaacagctccaagtagcgaaaaacgtcaactggaaccaggtgcaactggcttacgataaatgggactataagcaggaaggcttaaccagagccggtgcagcgattatcgcgctggctgttaccgtggttactgcgggcgcgggagtcggagccgcactaggcttaaacggcgcagccgcagcagcggccgatgccgcctttgcctcactcgcttctcaggcttccgtatcgctcatcaacaataaaggcgatgtcggcaaaaccctgaaggaactgggcagaagccgcacggtaaaaaatctggttgtagcggcggcaacggcaggcgtatccaacaaactcggtgcctcttcccttgccacttggagcgaaaccccttgggtaaacaacctcaacgttaacctggccaatgcgggcagtgccgcgctgatcaacaccgctgttaacggcggcagcctgaaagacaatctggaggcaaatatcctggcggcattggtgaataccgcgcatggggaggcggcgagtaagatcaaaggactggatcagcactatgtcgcccacaaaatcgctcatgccgtagcgggctgtgcggctgcagcggcgaataagggcaaatgtcaggacggcgcgatcggtgcggctgtgggtgagattgtcggggaggctttggttaaaaataccgattttagcgatatgaccccggaacaattagatctggaagttaagaaaattaccgcctatgccaaacttgcggcaggtacagttgcaggcgtaacgggaggagatgtcaatactgctgcacaaaccgcacaaaacgcggtagaaaataatgcggttaaagctgttgtaactgctgcaaaagtggtttataaggtagccagaaaaggattaaaaaacgggaaaatcaacgttagagatttaaaacagacgttgaaagacgaaggttataatttagccgacaacctgaccaccttattcgacgaaacattggattggaacgatgccaaagccgttattgatattgtcgtcggaacagagctgaatcgcgctaataaaggggaagcggcacaaaaggtcaaggaagttttagaaaaaaatcgtccttatatccctaataaaggtgctgtaccgaatatgagtacatacatgaaaaataatccttttggaaaacagctggctcaaatttcagaaaagacaacgcttccgacgcagcaagggcagtctgtcttcttggtaaaaagaaaccaagggttattaaaaaccggtgataggttttatttagatggccaacataaaaatcatttagaggtttttgataaaaatgggaactttaagtttgttctaaatatggatggttcgcttaaccaaatgaaaactggggcagcaaaaggtcgtaaattaaacttaaaataggaaattttatggaaacattgaatgatataaaaaaaatcttgattaatgtggggctttatcaagggtttgatttgacagatccaaaagtatcagaagaagttaatcatgaaacagctaatatgaaatggattaaagattatacttcagacgggaattgggataatgaatttaaggaggatttaaaaaactttttagattatatggaagtatgccaattagccctaaacgataaaaatttcaaaattgccagtaattctttatttatggctatgatttacgcaggtaatctatctcttatatttgattcaataaaaactgatatatcaacattattgagtgctgagtataaaaagaatagtttttcatggccatctcttgatgaatagaaagcaagttgtagcctgcatgaaatctaaaacccatgcataaggtgtgggcttcagtatacgcgttccatgatttacggccatatgccgtctgaaaagctcaattttttcagacggcatttgttatgaaagtaaatatttagattccctgtatactgtttagactcgtgtgtgctgagtaagctgtagtctgcatgaaacctaaaactcgctcaaaattaagctaagacattagcagggcaagggcgaaaattgaatcttaaataaggtgattcagatgaaaaattttaatgtagtaaaagaaagtttaagagagttaggaattaaacaaggatttgatctttatgagaaagccacaactgaaaaattgaatagtgaagatcctcttgacttacaatggctttctaactattcatctgattggaatgatgaattagaagaagactttgattctttttttcagcatatgaaggaatatcaatatgctattgacaatgaagacattaaatctgcatgtagttcactatgtgaagctatgctctatgttggtaatattaaaaatttttttgagtttctcaaaagcgatatgattagactgttgagaggtgaaagtaaaacaacagactttcaatggccgcaatttgatgaatagcagcaagctgtagcctgcatgaaacctaaaatccatgcgtaaggtgtgtgcttcagcacgcacgcgttccatgatttacggctcaatgccgtctgaaaagctcacaatttttcagacggcatttgttatgcaagtaaatattcagattccctatatactgcccagatgcgtgcgtgctgaagacaccccctacgcttgctatttgaaacagctccaagtcaccaaagacgtcaactggaaccaggtacaactggcgtacgacaaatgggactataaacaggaaggcttaaccggagccggagcagcgattattgcgctggctgttaccgtggttactgcgggcgcgggagccggagccgcactgggcttaaacggcgcggccgcagcggcaaccgatgccgcattcgcctcgctggccagccaggcttccgtatcgctcatcaacaacaaaggcaatatcggtaacaccctgaaagagctgggcagaagcagcacggtgaaaaatctgatggttgccgtcgctaccgcaggcgtagccgacaaaatcggtgcttcggcactgaacaatgtcagcgataagcagtggatcaacaacctgaccgtcaacctggccaatgcgggcagtgccgcactgattaataccgctgtcaacggcggcagcctgaaagacaatctggaagcgaatatccttgcggctttggtgaatactgcgcatggagaagcagccagtaaaatcaaacagttggatcagcactacattacccacaagattgcccatgccatagcgggctgtgcggctgcggcggcgaataagggcaagtgtcaggatggtgcgataggtgcggctgtgggcgagatagtcggggaggctttgacaaacggcaaaaatcctgacactttgacagctaaagaacgcgaacagattttggcatacagcaaactggttgccggtacggtaagcggtgtggtcggcggcgatgtaaatgcggcggcgaatgcggctgaggtagcggtgaaaaataatcagcttagcgacaaagagggtagagaatttgataacgaaatgactgcatgcgccaaacagaataatcctcaactgtgcagaaaaaatactgtaaaaaagtatcaaaatgttgctgataaaagacttgctgcttcgattgcaatatgtacggatatatcccgtagtactgaatgtagaacaatcagaaaacaacatttgatcgatagtagaagccttcattcatcttgggaagcaggtctaattggtaaagatgatgaatggtataaattattcagcaaatcttacacccaagcagatttggctttacagtcttatcatttgaatactgctgctaaatcttggcttcaatcgggcaatacaaagcctttatccgaatggatgtccgaccaaggttatacacttatttcaggagttaatcctagattcattccaataccaagagggtttgtaaaacaaaatacacctattactaatgtcaaatacccggaaggcatcagtttcgatacaaacctaaaaagacatctggcaaatgctgatggttttagtcaaaaacagggcattaaaggagcccataaccgcaccaattttatggcagaactaaattcacgaggaggacgcgtaaaatctgaaacccaaactgatattgaaggcattacccgaattaaatatgagattcctacactagacaggacaggtaaacctgatggtggatttaaggaaatttcaagtataaaaactgtttataatcctaaaaaattttctgatgataaaatacttcaaatggctcaaaatgctgcttcacaaggatattcaaaagcctctaaaattgctcaaaatgaaagaactaaatcaatatcggaaagaaaaaatgtcattcaattctcagaaacctttgacggaatcaaatttagatcatattttgatgtaaatacaggaagaattacaaacattcacccagaataatttaaaggaaaaattatgaaaaataatatttttctaaacttaaataaaaaatctataaataacaaccattttgttatttcgattttttttgaaacaatttaccaatttgaaactaaagatacgcttttagagtgttttaaaaatattacaactaccggacattttggagtaataggtgctcaatatgaaaaaatagatgctaccagatggattggagattatgaagaggtaaatggatttgagtatattgataaagctccttctatttatttttcagttggagatgatttcaatcctgaagaattaattatacctattaatttagcatatcattactttaatattgcaatatctgatttcttaatagctcaccctgaatatcaaaaaaagtgtaaagaaatacaaaaaacatattctcaaacaaactgtagcctgcatgaaacctaaaatccatgcgtaaggtgtgtgcttcagcacgcacgcgttccatgatttacggctcaatgccgtctgaaaagctcacaatttttcagacggcatttgttatgcaagtaaatattcagattccctatatactgcccagacgcgtgcgtgctgaagacaccccctacgcttgctgcagaactttcgggtaaaaccggtgtgagcattagcgcaccgtatgccaatgagaacagtcgcatcctgctcagcaccacggatatcagttcggaaaacggcaaaatcaaaattcaatcttacggtgaccaatattactatgcgagacagagcgaactctatacctttgaacgccgcagctacaaaactggcaaatggtacaaccgcaaacacattaccgaagtcaaagaacacaaaaacgccaagcccgacgcagtaaccctcagcgcatcccaaggcatcgacatcaaatctggtggcagcatcgacgcctacgccaccgcattcgatgcccccaaaggcagcattaacatcgaagccgggcggaaattgacactctatgccgtagaagagctcaactacgacaaacttgacagccaaaaaaggcgcagatttctcggcatcagctacagcaaagcacacgacaccaccacccaagtcatgaaaaccgcgctgccctcaagggtagttgcagaatctgccaatctgcaatcaggttgggataccaaactgcaaggcacacagtttgaaaccacactgggtggcgcaaccatacgcgcaggcgtaggcgagcaggcacgggccgatgccaagattatcctcgaagggatcaaaagcagcatccacacagaaaccgtgagcagcagcaaatctactctatggcaaaaacaggcaggacggggcagtaacatcgaaaccttgcaattgccgagtttcaccggtcccgttgcgcccgtactgtccgcacccggcggttacattgtcgatattccgaaaggcaatctgaaaacccaaatcgaaaccctcaccaagcagcccgagtatgcttatttgaaacaacttcaagttgcgaaaaacatcaactggaatcaggtgcagcttgcttacgataaatgggactacaaacaggagggcatgacacccgcagcagcagctgtcgtcgttatcgtcgtaaccgtattgacctacggcgcactgtccgccccggcagccgccggaacggcgggcgcggcaggcgcaggagcgggaggagccgcagcaggaacggcagccggaactggagtagcagcaggaacggcagccacaaccggagtagcagcaggcacatcagctgcagctatcaccacagccgcaggcaaagccgcactggccagtctcgccagccaagccgcagtttccctcatcaacaacaaaggagacataaaccataccctgaaagaactgggcaaaagcagcaccgtcagacaggccgccaccgccgccgtaaccgcaggcgtactgcagggcataagcgggctgaacacccaagcagccgaagccgtcagcaaacattttcacagtcccgcagcaggcaaactgaccgctaacctgatcaacagcaccgctgccgcaagtgtccataccgccatcaacggcggcagcctgaaagacaacttgggcgatgccgcactgggtgcgatagtcagtaccgtacacggagaagtagcgagcaaaatcaaatttaatctcagcgaagactacattgcccacaagatagcccatgccgtagcaggctgtgcatcggcggtagcaaataaaggcaaatgtcgggacggcgcaatcggcgcggcagtcggcgagatggtgggagaaaccctgttggacggacgcgatgtaggcaaactgtcaccccaagaacgccaaaaagtcatagcctactcgcagattatcgcaggcagcgcagtggcattggttaaaggggatgtgaatacggcggcgaatgcggctactgtggcagtggagaataatagtcttttagctcgcaggagggtaaatatacgttggacttcgcgacaagaattggaacatgaatatgccattcttgaaatccaggccattaccaatcaaatccgaaggctggatccgaaatttaacgggattgctattatgaggaatcctagagagccgtggacaagacatgatgtacaaacatacaggcaatattataatcaattaagggaatccagaggctttgctgttgacccaatttatagaatcaggataaacaacggcaatgaatttaaccgtatcatgtcatcaaaatacccttataatgagctttatgtagccaatcctaaatcggcgacggggtattttagggtagattcgtataatcctgcgacagaggaaattatttcaagaaaatttacccaattttctcaaatccaagaaagtacggggattggttatatcaaggaggctgttagaaaatatagccctggtgctgtcatttccaatgttccaagtacacctactacgataagaggaagaaagcttgaaggaaaacttattttagaagttcctgctcaggtcaatccaattccacaatctgtattaagggcggcacaagaagaaaatgttatcattagagatacaacaggaaggatttacaaatgaagaaagatattttttattgtgagcagtggtcttatggttataagaaacttcataagcctttttctgagaaacaagctgaggaaaaacatcttaaaggggagttatatactgccgtaataggttcggcgacacaacctgaatatgtaattaccttgcgagaggaagtaggttttttttcggtacattttttcgataaatttggaagggattatttaacccatcaatttcaaaaatattccaattcgaattattattttctttctatggctgtatggagagattatataactttggaatctcatgacttagcagaaggatatacttatttcttcaatgaaaatacggatgattgctatgttttgaaagaggattttattaataatgagcgatatgaaaaaacagaattatattcccaaaaagataaggtaattctatttccaaagtttggcgaatatgatttggtgttaaatccggacattatttaattgagttttaaggccgtctgaaaaaatttcagacggcttttattattgggtttggaatctgaggataaagctgataaaaaccaggaaattatcaggttgctatatacgtattgttgtacagactaaaggcagcaatcaaatcactactgcttacccacaaaaataaatcgattatatggagtaatcatgaataagagaatgaaaatgtgtcctgcttgtcaacaaggctatctctaccattcgaaacctaaatatcttcatgatgaaattattctgtgtgatgaatgcgatgcagtatggctcaaaggtatgaatatattttatggagaatatgaaaaagatttttattcttatgttcctttcatggaatcccaaggtataacgagtgaatgtatttgggaaggagatttgtttgatcatccatattatgaagatgaaaactcaaatgatatggattgatggaaattttaagcctgcgtaggtacgattagccatcaaacggcgtaatcatacgcaagattatcaacagagagggctggcagcgatataccacccacaagattgcccatgccatagcgggctgtgcggcagcggcggcgaataagggcaagtgtcaggacggcgcgattggtgcggtcgtgggggagattgtcggggaggctttggttaagaataccgatttcagcggtatgactgcttctgaaattgaaaaagctaaagcgaatattactgcgtatgcaaaattggtagccggagcgactgtaggtgttacaggaggcaatgttgatgtggcggcaaatgcttccgaaacagctgttaaaaataatgcattagatattatttgggatattggcaacctcgtatgggacggcggtaaatggatttacgccaaatctattggcgataagcagatggctcgagaagcggcgattgattttggtgtggatgccgccgcagctgccgttccctttgttccggcaggtgcgactaaaatcagccgaggcggggcttatgttctgaaggcgggagacgaagcagttgatacggctaaagccatacaggaaattcagaagcagaccggaatcaagcttacttatgataaggttaataaggtttggacaacaccggcggggttagattatgggttagatgctaagcatggtaataggattaaacatgttttagcccatacaattccaaatccaaacaaacctgttcattctgtttttaatgtgtcccgtaaagaagttttgcctttggttgatgaagcttggagaatgaaaggaaatcctttgccaaatgattcatccgtatatcttgtagatatgaagaaacctattggaacaaaaggagaaacaaaagtgcggattgttgtgcaaaaaggaacaaataaaatcatttctgcatatcctcagaaataattaagaaaggaatctcttatggataaagaaattaaaatttgcccaagatgtgagcaaggctacctttatcatgcaaagcctaaatatttctctggggaggtcattttatgcgatgaatgttatgctatgtggcttggggatatgaaaattttttacggacaatatggaaaagatttttatgattatcatgagtttatgaaagataaaggcatagaagaaataaatatgtgggaaggagagctttttgatcacccatattatgaggatgaaaaatttaaataattgattttctgttccccgaatttgggaaatacgatgatattttaaacccaaatattatttaaagtagcaataggccgtctgaatatccgtttttcagacggcctcaatgcaactgctggcagccgaaggcattcaccaacaccaattgaatgttcagaaaagtacccgtttcatcggcatcaaagtgggtaaaagcaattacagcaaaaacgagctgaacgaaaccaaactgcccgtacgcgttatcgcccaaacagccaaaacccgttccggctgggataccgtactcgaaggcaccgaattcaaaaccaccctttccggagccgacatacaggcaggggtgggtgaaaaagcccgagccgatgcgaaaattatcctaaaaggcatcgttaaccgcatccaaaccgaagaaaagctggaatccaactcgaccgtatggcaaaagcaggccggaagcggcagcacggttgaaacgctgaagctaccgagctttgaagggccggcactgcctaagctgaccgctcccggcggctatatcgccgacatccccaaaggcaacctcaaaaccgaaatcgaaaagctggccaaacagcccgaatatgcctatctgaaacagcttcagacggtcaaggacgtgaactggaaccaagtacagctcgcttacgacaaatgggactataaacaggaaggcctaaccggagccggagccgcaattatcgcactggccgttaccgtggtcacctcaggcgcaggaaccggagccgtattgggattaaacggtgcggccgccgccgcaaccgatgcagcatttgcctctttggccagccaggcttccgtatcgttcatcaacaacaaaggcaatatcggtaacaccctgaaagagctgggcagaagcagcacggtgaaaaatctgatggttgccgtcgctaccgcaggcgtagccgacaaaatcggtgcttcggcactgaacaatgtcagcgataagcagtggatcaacaacctgaccgtcaacctggccaatgcgggcagtgccgcactgattaataccgctgtcaacggcggcagcctgaaagacaatctggaagcgaatatccttgcggctttggtgaatactgcgcatggagaggcagcaagtaaaatcaaacagttggatcagcactacattgcccataagattgcccatgccatagcgggctgtgcggcagcggcggcgaataagggcaagtgtcaagatggtgcgatcggtgcggcggtcggtgaaatccttggcgaaaccctactggacggcagagaccctggcagcctgaatgtgaaggacagggcaaaaatcattgctaaggcgaagctggcagcaggggcggttgcggcgttgagtaagggggatgtgagtacggcggcgaatgcggctgctgtggcggtagagaataattctttaaatgatatacaggatcgtttgttgagtggaaattatgctttatgtatgagtgcaggaggagcagaaagcttttgtgagtcttatcgaccactgggcttgccacactttgtaagtgtttcaggagaaatgaaattacctaataaattcgggaatcgtatggttaatggaaaattaattattaacactagaaatggcaatgtatatttctctgtaggtaaaatatggagtactgtaaaatcaacaaaatcaaatataagtggggtatctgtcggttgggttttaaatgtttcccctaatgattatttaaaagaagcatctatgaatgatttcagaaatagtaatcaaaataaagcctatgcagaaatgatttcccagactttggtaggtgagagtgttggtggtagtctttgtctgacaagagcctgcttttcggtaagttcaacaatatctaaatctaaatctccttttaaagattcaaaaattattggggaaatcggtttgggaagtggtgttgctgcaggagtagaaaaaacaatatacataggtaacataaaagatattgataaatttattagtgcaaacataaaaaaataggagttagtatgaaatatatgattagttttctaaaaaaaacatttgaattaatgagttgggtgttagtcatactaataattgggacattttatgactattatcaaataaggcaatatgctgaattagaaaagaaatctatatcaaatatcttgctatatgcccaaaaagaaaaatttcgcttagagagtaaagataaatacatgcgaggaggatatacaaaatataaatttattttttcagaatatagtaatactacttttttaaatttcataaatgacctgaaaaaagataattatttaccacttgacggctatggacatggttttctatgtagaaaaggagagtctatatcaatcaatatataccctgaaattaataaatttattttagtatggggataccctgaaaatctttgcgctgattctaattaagtaagcaagaataggttatagggaaataaaattcaaatgagaaaattgaataatcacgatgttcataaacggtatcaagatcgtttagaagaggatgtagagttcactatcaactatgagcttcctttgagttgtttgtggtcaaccatcaaagacttttccagcgattttgaggaaaaaactgaagcgttctttattcttttcaaagagctgctgcgcagaggtcatctgaaactgcaacgcgacgggcaaattatcgggcatacgcccgaagaatgggaacaaatatttagggaagtatggcctgaatatgaaatcgaacccaatccacttcccggctatgccccatttgatattggaatgtggcttacggtcgaggctcctgcctacgccgtatggatagatcccgaagacggtagcgaatactgggcgggataaaataccaatgtttggaataaatcccgtctgaaaaacagctttttcagacaggatttattccaattatcggtgatatacagagttttgtacaagcacagaccgctgccgatcacctgtttgctttgctgggtgtggttccgggtatcggtgaatcgatacaggcctataaagtagcgaaagcggcaaaaaatttacaaggcatgaaaaaagccttggacaaggcagcaaccgttgccactgcacagggctatgtcagtaaaaccaaaatcaaaatcggtcaaactgaattaagggttactgcagcaactgacaaacaattgctgaaagctattggcgaaggaaggacacgacaggtaaaatgaccgagcagttatttgactctttagctaaacaaaatggcttcagagtgctttcgggcggcaaatacggcggaaataacggttttgatcatgtatggcaggctgccgatggtagtgttgttttgattgtagaaagtaagcagattaggaacggtacggtacagctgaatccgaatggtgcgggtggatatacgcagatgagtcgtgaatggattaaacaagttgtaaaaagtttacctgatggtagtcctgctaaggcagttgtcttaaaagcaaatcagaacggcaaattaaaaacggcaatagcaggcgttgatcgtcaaacaggtaaggccgttattctttctgtcaaagttccttctaaaaccaatataaggagataacaatggggcacaatatgatgaccacccaaaaatggtatgaacatattactaatgtaatcataggcaatactgctaatttcaatagcggttgccccgaatctatagattatgtagatgaaaaaaaaggcgtgccgcttgcagcgatgaaatacattttaatgtacactgaagctgcggcttcccatgcctatctatttgaacatgatcttaagaaattcaagcaatatgcttatgttgcaggaaagttgggtattttgcagagtgtagatgatgaagaccccgaacccttcttctttccctgcgacatgctcaacattcaagatccgatgtttctgatgctgatgagcgacagcccgcagctgcgcgagtttttggtgcgcaatatcgacaacatcgccaacgatacagaagccttcgtaaaccgatacgacctcaaccgtcatatgatttacaatactctgctgatggtggagggtaagcagcttgatcggttgaaacaacgtagcgagaaagtcttggcgcatcccacccctagcaaatggctgcaaaagcggttgtacgattaccgcttcttcctcgctttcgccgaacaggatgccgaggcgatgaaggccgccttagagccgctttttgataaaaaaaccgcgcgtatggctgccaaagaaacattgtcctatttcgatttctacctgcagccgcaaatcgttacctacgccaaaatcgcatccatgcacggtttcgatttgggcatagaccacgaaatcgcgccgagggatttgactgtttacgatccgctgccggcagacgaatatcaagacatcttcgattttatgaaacagtatgacttgtcttatccgtatgaatatctgcaggattggatagattactatacgttcaaaaccgataagctggtatttggtaacgcgaagcgagagtgagccgtaaaactctgagctcctgttttatagattacaactttaggccgtcttaaagctgaaagattttcgaaagctataaattgaagcccttccatagtacatagatctgtgttgtggcgaggctttaccacgctgattgccggagaagaactcaacctgctggcaaaacaaggcatgagatctttgcaataacatgagttgagacctttgcaaaaaagcccttccccgacatccgaaacccaaacacaggatttcggctgttttcgtaccaaatacctcctaattttacccaaatatccccttaatcctccccggatacccgataatcaggcatccgggctgccttttaggcggcgcgggcgcacttagcctgttggcggccttcaacaggttgagacctttgcaataacataggttactaaaattttatgctcaatctcattttcaaaatgcaaaacttttctgatttttcctactttttgctcaatattaggaaggttttaggcaattgaaaattttttggcgcatttttatgcgtcaaatttcgttaacagactatttttgcaaaggtctcaggttcaaacacatcgccttcaggtggtttgcgtactcactttgtcatttccaatgttccaagtacacctgctccgctaagaggaagaaaacttacaggaaaacttattttagaagttcctgctcaggtcaatccaattccacaatctgtattaagggcggcacgagaagaaaatgttatcattagagatacaacaggaaggatttacaataggtggtggtttagtattaggtggttgtgcaggtgcacatcttgcaagaaaagaaccattgatactaacagggaaaacaggggcaggtgcgtcagcaattgcaaatgcaagcattggatatcaatggactgtcaatttgtcaaagccaaaagaaggagctaaataataatgcattcccactatatatttggtattttgatgatttcatatgttttcgcaatgttatttaattttataatatcatataaaatatttaaagaagaaaaattaattaatggtttttttgattttctaattaaatcaagctaccttaactttaaatatttcaatatattatttggaaaataaaaaatctcaaatattttttatttgaaattattaagaattaatctggcgttgggggtttttatcttatccttaataattataaatattttttgtttttagtaaaaatatggtacagatatgtacagctagctttgtttcagtaaggtataactgtatataatactcagatttttcacgttgggctatacatggaaatatatctgtgattaaagatgttaatggtaagtatcgattagcacctgaaaagcatgattttaaaatgcattcctttggggggagaaaaaagtaatgtaaaaacaatatttagaaatatggaaactataattggtagcccagggtaaggggtacctttcaggattgaatttaaaggagaggtaaatattgttaactaagttgaaaattttgctatttttgttcttatttgtttttgtattggctattaatttgcttttcttcttttttagttcggatatcgagagtttcgggaactatcagtttgaatatgtttacgataaaggttggcctgctaattatattttagtcatgaaagatggaaatgaagggaattttgataaaataatatccggattggttttagaatattataaggaggatgataacatttatttttcttatattgacgggcaaggatttgcttcagactcttgctattacaaaccggaaattttatatggaaaaattattttaaataaaaatcatatcattaatattaatagcatggaaaaaaataattttctttcagaagataaaataatgaagggaacaagaaattggctagcagaccctaaaaataaatgtaatatacagactctagactaaacgcgtcttgcgaaaatacaacggaatcgatcgtaaatctttcccgctgttcttgaaagaatgcgaatttcgatttaacttcggcacaccgtctcaacagcttaaaatcctgcgggattggtgtgggatttagggctaatctagtacagccccttgttttttcgatacggaaccggatagaggaaaaatcgaacattgcgcctgccttgctatgattcacgaagaaatctccgccatgcctatgggctatgaaaccttgatcggcgatatgggcagcgcactgtcaggcggacaaaaacaacgcatcgtattggcgcgggccttaatattgcgaaccgaaaatcctatttttagatgcagcgaccagccatttggatattgccaatgaaaaagcagtcaatgcaaacttgaatggcttgtctatcataaaaattatggcggcacacagaaaggaaacggtggaatcagcagataggaaaatgtctttaggataaaaatacagtttcaaaaatactcaagactactgccgttttttcgcctgagcgtcaaactctgccagcgtcatgttcaaagtctgcaaacacggtgtcattaccgcatcgacagcttggttcacatgatccctttccacaggcaacggacggtaaacgaagagcttgaagagttcgttcaactcaatcgaatccgcccccgttttcaacacccaaccctgtctgccggaatagatgtagccgtgccgcgccagcttttccaaaagctcgcccaactcgtcgtagcccatattgatatgccgtctgaactcctgaacaggcaaggctttgccttctttttgcgccgcatccagaagcagcaggattttcaacacgtcgtcaaaccgtccgcgcgagtcgaagcccctgcggaacgcttctccctgccagtaggagagtgaagaagtcagcaccgcgccgcccaagaccagcgtccacaacaggttcagccacaacagaaaaaacggcacggcggcaaacgcgccgtaaatcgagcggtagccgtcgaaattgcccatataccaagtgaagagggagcgcgcggtttccagacaaaacgctgttgccaaagccccgacaaacgcctgccgcgcgggaacgaagcggtttggcacgaagcggtacagcccccacagcaaaagcgtcatgaaggtcagcgtcgccgccgttcgcaacgcgcccgaccactgcggcgcacctgaggcaagcgcggcatcctgtaccgagccgaccataaaggaaatgcccacgcccaaagacagcggcccgaacgtcagtaaagcccaatagacgagaaactgcatcatccacggacgctgggaattgacccgccagatgcggttgaacgtattgtctatcgtccgaatcagcatcagcgaggtaacgaccagcatcacgctgccgattgccgtcagccggttcgcctgctcgcggaacgcattgatatagtcgaacaccatgtccgcgccctgcggcacaatggtttggttgacgaaggagacgaacgaatccgaccagcggtcgaacacggggaaaatcgaagcgaccgccaccatcacggtcagcacggggacgagtgccagcagcgtcgtaaacgtcatgcttgccgccgcctgcggtacgcgttcttcatcaaagcggcggacgacgaaccatgcaaacgcacagattttattgtctgccaaaccttgcaaacgttgtaaaaaggtcataatttcttgcccggtcagtaagttgggcattgatgcccgatgttatagccaattttgccgtcaggaacaaatgcctgaactgcggctgtttcagacggcatcggaacaactgttatgccgtctgaagaccgaaccattttaacggaatccgcccatgaacccaaatccccctcaaaatcctcgtcctctactatttccaaaacggcagcacccgcaatcccgcactccgaatcgctcgcggcatcgacagcgttgaaggttgcgaagccgtattgcgcaccgtccccaaagtctccgccgtctgcgaagccgtcaaaaaagatattcccgacagcggctcccgtcctgaccgccgaagaaaacaatatcgccttcgcacaaagcaaacgcttggcggaactcgccgtcaagtcggcataagccgcgtgttcagacggcatggcgttcagatgccgtctgaacacgtttgcctgtataatccgcatctttactgtccaacttcgcggttcgcaaacctcccgcgttaccaaaactaggattcgatatgtcaaaccaacaagccttggtcatcttttcgggcggtcaggattcgaccacctgcctgattcaggcaatccaaacctacgggcgcgaaaacgtccaagccattactttccaatacgggcaacgccatgccgtcgagctggaacgtgcccgctggattgcgcaggatttgggcgtcaaacaaaccgtactcgacttgagcctgatgcggcagattacgcacaatgccctgatggacgacaccgccgccatcgaaactgccgaaaacggcgttccgaatacctttgtagacggccgcaacgcgcttttcctgctctatgccgcgatttacgccaaagggcaggggatacggcacatcatcgcgggcgtgtgcgaaaccgacttctccggctatcccgactgccgcgacgtgtttgtcaaatcgatgaacgttacccttaatttggcgatggactatgattttcaaatccacacgccgctgatgtatctgaccaaggcgcaaacgtgggcgttggcggacgaaatgggcgtgctggactatatccgcgagcaaacccacacctgctataacggcatcgtcggcggctgccgcgaatgcccgagctgtatcttgcgcgaacgcgggctggcggaatatctggaaagtaaaaaggccgtctgaacacgcgcaaaccataaggaatacgatatgcccaagctccatatgttttacctcggcggcaatgccggcaggtcgaatatcgaagtgcacgacatccaatttgccgtgtgcgacaactaccgcgaggccgtccccgcgctcaaagccgcgtggttcggcgatgcggacaaaatccacatcgacggctggcagattgtcgaatgggcggacggttacgacatcgccgtatccgaaacgcccaaaacgaaaatgccgtctgaacacgccccgcgcctgtatttcgccaatgtcggcggttatcgcgcgggtcagcttgccgaggcacacgctttcgggctgttcgccgccgccacgcctgccgaagccaaacaaaaagccctgcaaaccctgttgaccgacagctatgttcagcagcataaagacaacttaaaagacgtggacaacctgcttgcgctcgaccgcatcggcaatttccatatccgcctgaccccgaatccgcacggcaaacccgccgaaatcggctttcaaggctatttgcccatttgagaacccatgaaaatcaccaaaatcttcaccttcgactcctcgcatatgctcgacgggcatgacggcaaatgccaaaacctgcacggacatacctacaaactcgaaatcaccgtttcagacggcattatcaaaggcggcgcgaaagacggtatggtgatggactttaccgacttgaaagccattgtcaaacaacacattaccgaccccttcgaccacgccttcatctaccacggcggcaacagccgcgaatgccaaatcgccgcgcttttggagggctggaacatgaaaaccctgcgcctgccctgccgcaccactgccgaaaatatggcggtcgaaatgtacggccgtctgaaaaacgcggggctgaacgtgtgccgcgtgaaattgtgggaaacgccgacatcgtgtgcggagtatgaaggggagtagggaatatcttgaacgtatcgatatagtaaattccaataagacatgcccaaccgcgtcattcccgcgcaggcgggaatccagaccttgatttatcaggaatatttaaaaattgcagcaattccaactctctggattcccgcctgcgcggaaaggacggtttagagcgtccttatttgaatttaccgtaaaacggttttttctcctgtacggattccccgttttttcagacgaccttccatatcaaatacacccattaaaaggaatacccatgaaactcctcttcatcctcctagtcctcttcgtcgccgtcgaacatttctacatcgcctggcttgaaatgacacagattcccagcgaaaaagcggcggaaatattcaagctgccttatgaatttatggaacaaaagcaagtgcagaccttgttcagtaatcaagggctgtataacggctttctcggcatcgggctggtgtggtcgcggtttgccgcgccggacaacgccgtttacggcgcgacgactctgtttctcggtttcgtattgattgccgccgcgtggggcgcgttttcgtccggcaacaaaggcatactcgtcaaacaaggactgcccgcgatgctggcggcggcagcggtgttggcggtatgaaaaaaatcaatgttgcccccgaaaatccgcaataccgtatcgtcgaaattttcgagagcctgcaaggcgaaggctggaacacgggcatgcccgccgttttcgtccgcttgggcaaatgcaatctggcgtgcggctggtgtgataccgattatttgacattcggtatgatgggcttgtccgatatcttaggccgtctgaaaacctacgccgcccgcaacatcatcatcaccggcggcgagccgaccatacagccgcatctcgatatgctgctggacacgctcaaggcggaaggctatttcctctgtctcgaaaccaacggactcaatcccgcgccgccgcaaatcgactacgtcgccaccagccccaaagcctgctacgccgccaaatatgaaaatagctgtatcgaaacagccgacgaagtgcggattgttgccgatggtgatgtccttgcgttctgcgaaaacatggaacgcaaaatccgcgcacatcattactacctttcgccctgtgagcaagacggtgcgatgaacatctacgacaccatccgccaaatcggtattttaaacagtcgccccgacgcatccgtgcattggcagttgagcgtgcagacgcacaaatgggcgggaatagagtagtttaagcagtgtaactcaaagggacggcgtacggttttaccgatgtttgacatacggggaaagtgtgccgcttctgcgtggaaatgccggcatttccaccgcccaatcaggacggagccttactgaataagatgctgccgttgggtacaagctcggcttcctaaattccgatggtcttttgaaccttgccgatactctgtgccagtgcgcgcaaatggcagggttagggaaaacgaaatgccgtctgaaacagcattctgtttcagacggcatttttctgttgccgccaaaaggaaaaaccgcctcggcaatggatgccgaggcggtttgaatatggtcggaatgagaggattcgaacctccgcccccttcgtcccgaacgaagtgcgctaccgggctgcgctacattccgaattaagtaaggcgtgattatagcgcaaaaagtgcggcgtgcctataccgttttgcctttttgccgcgtgtcgggcggatttaaaacgttgtgtttgaatacagtgttgataatcatcattatctttaagtaattcaataagataactttctacctgaccgaaaaaatcattgcctttccctgacaaacggttgatgaaatcggcagattgttgaaacgcagccggtttaaaaggcttcgccgactttcacgccgcccgccgtgtcctgcggcgaggcaaggccggcaacaaaggcttgcgccgcttggaaatccgccgtctgcatcacggcttgcgcggcggcactgccgagcgtgttggccatatattgccaacgttgcgccaaagtgggattgtcaggaatgcggaaatcttcgcgcagttcatccacaaggtcgggacggttgcagacgaggacgatgtcgcaacctgcctcaaaggaaatgcgggcgcgttctttgatgccgcctgccccgcacgcgccctccatagtcaaatcgtccgagaaaatcacgcctttgaacccgatgtcgcggcgcaaaatttgtttgagccagatttcggaaaaccctgcgggctttgtgtccacttgtggataaacgacgtgggcgggcataaccgccgccataccttcgcggctcataatgcggaagggggcgaggtcggcggtttcgagttcggacaggctgcgccagtcttccggcaagaccagatggctgtctccttcgacaaatccgtgtccgggaaaatgtttgccgcaggatttcataccgccttttgtcaaacctttttgaagggcgagggcgaggcgggcgaccgcttcgggattgcggtggaaactgcggttgccgatgacggggcagtttccccagtccaaatctaagacgggcgtgaaggacaaatcgatgccgcaggcggaaagctcggttgccaaaacccggccgacttgtccggcggcggtttcggcggcggacgcgccgtctttgtcccaaatctcgccgagcgtactcattgcgggcaggcgggtgaagccttcgatgaaacgttgcaccctgccgccttcgtgatcgacggcgataatgagttcgggtgtgcgcagggctttgatttcggcggtgagtgttttgagttgttcgatgttttggaagttgcggcggaagaggatgatgccgcctacggcgggatcgagcaggcgttgcttttcctcttcggtcaggcggaaggcggcaatgtctgccatgacggggccgcgcggaatatgggggacggtcattgcggtttgctccaaaaagcttcagacggcatatgccgtctgaacagggaaaggggtcaggcgttggcgcgttttttatctttcaacagaaaaatcagcaccgccaatacaatgcctgtcgtgccaaagcccaacagcgcggattttgtcagacccaatgcgaggtagcccgatgcggcggcggcggcaacggttaaggcgtaaggcagttgcgaggtaacgtggtcgatgtggttgcagcgcgcgccggtggacgacaggatggtcgtgtcggaaatgggcgagcagtggtcgccgcataccgcccccgccattactgcggacatacacgggataatcagcgcgggttcgactttgaccgccatggcggcggcaatcggcagcataatgccgaacgtcccccagcttgtgcctgtggcaaacgccatcacgctggcgagcaggaagaggatgacgggcaggaagccgggatggatgttgcccgcaaccagtgtggagaggtaatcgccggtgtgcatttcgccgacaaccgtactgatgagccaagcgaggattaaaatggcgattgcgccgaacatagatttcgcaccctgccaaacggctttgggatagtcggcggttttaatcgtgccgagcgtgcagagaacgacggcaaggacgccgcaagtgccgccgaataccagcgaagtgtttacgtccgtgttttcaaatgcccccaaaatgctgaaggtttcgcttgcctgcgcgccggtgtagatcatggcggaaaccgttgaggcgattaaggccaaaacgggaataatcagtgcgtaaacacgacctttggtagcgtctgaaacggcagtttcatcgtgggcttcgttcaacgcggcttgttcgaaacgtgccatcgagccgatgtcgaaggaaaaccatgcgacgacgaacaccataatcagggcaaacagtgcgtaatagttcatcaggctcatggcgacaaacgtccccatcggcgtgtattcggtgattttgtaggtaacgagcagtccggcaagcgtggcgataatcgacgcgccccagcttgaaacgggcatcagcacgcacataggagcggcagtggagtcgaggatgtaggcgagtttggtgcgggaaactttaaacttgtcggtaacggggcgggcaatcgcaccgacggcgagactgtggaaatagtcgtcgataaaggttacgaacacgaggcaggcggtcagcattttcgcgccgcgccggtttttaatgtgccgttttgcccagtcggcaaacgcctgattgctgccggagtaggtcagcagggaagtaaaaatacccaaaagtatcaggaaaaccaagatttttggtttgcccagcgaccaatcgccgtctgaccaagccaagccgacgaccatgtctttcaggtgtgtcagaccgtcgacggggttgccgccgaccaaaaaggcaacgccgaccagaataccgatgcctaaagacagcagtacgcggcgggtaatgacggcaagtgccagtgccaaaaagggtggcacaaccgagaaaaatgaatgtgaatagtcgatcagctgcatggttatgggggtgttaagcgtccggatgggagcgtatctgtccgcctccggtttgggttttgttggcaaaatgggcggaaatattttttgtcgtaaaaaatatttgtttaaaatcaaccaactgatttttgtaaaatgcccgttaatcggtattgacgggcattttatcatttaaaaaatattttggttaaattatgtgtgttattgcaggtttaatgcgataaacagcgtgttgccacggcgcatgatcagcagggggacgtttttgcctgccttgtccatagctttgcggaaaccggcttcgtcattgacggggacttgcccgacggcaagaatttcgtcgccgcgcctcaagcctgcgcgttctgccgcgtcggaaacccgtacgacgacgaggtgtccgccgctgctgtcggtatgtgtctgaagggtaatgcctgcggattcgaccgagaacgtaccggattgctgttcggtgtagggggcttcatctgttttggatgatgcgccgatatgctcggcggcgttgcccagcttgactttgattgtgatttcttcgcctttgcgccatacgccgaggctgacttcttttcccggcgtaatggcgccgaccataacgggaaggtcgccggaagaacgtatttctccgccgtcgaggctgaggacgatgtcgcccgcctgcaggccggcacgttctgcggggctgccgggcaggattttggcaatcagtgcgccgccggctttgtccaaaccgaacgattgtgccaaaccgtaggatacttcttgaataatcacgcccagttgtccgcgttggactttgccggtgtttttcagctgttcggcgacattcatggcaacgtcaatcgggatggcgaaggaaatgcccatgaatccgccgctgcggctgtatatttgcgagttgatgccgacgacctgtccttttaagttgaacagcgggccgccggagttgcccggattgatggcaacgtcggtttggatgaagggtgtgtagctttcgttgggcaggcttctgcctttggcggacacgatgccggcggtcacgctgttgtcgaagccgaagggcgcgccgatggcggcgacccattcgcccggtttcaaatctttgggattgccgattttgacgacgggcagctcttccgttgcgtcgattttcagaagggcgacatcggattggacatccgaaccgatgagtttggcggtatattcgcgcttgtcgttgagcaggactttgatactgcccatgccggtaacgacgtgggtattggtcaggatgtagccgtctttgctgatgatgaagcccgaaccgaagttcaatccgccgtcatctgcttcttcttgggggatttcgggcatattcgggacgaggcgtttgaaaaattcgtagaacgggtcgttgtcggcaatcgggtcggaatcgttttcggcattgccgctgccgttttgggtgcgcggggcgggggctgcctgaatattgacgactgccggaccttcactttgaaccagttgggcaaagtcgggcagcagcatactgacgctgccgtcgtctttggtgtgttcgatgcgttctacgaaggatgcttcttttttgtccgcaccgaaaaagctgcctgccttgtcgcagcctgccagcgaggcggcacacagtgctgccaaagcgaggtattggtattttttgaacacgttttgtcctttgtcggatgccggtaccggctttaatgccgtctgaagcgcattttgtcggcttcagacggcataggttgaaattctacaacgtccgtccgaattttcaagcgtttcattttgaagggcggcggcggtcaggctttggcgggatattcgcacaaatcgttgatgatgcaggtttggcattgcggtttgagtgccttgcaggtgtagcgtccgtgcaaaatcagccagtggtgcgcgtccatcagaaattctttaggaatgaagcgcatcagtttgtcttcgacttcgcgcacatctttcccgggggcgattttggttcggttggatacgcggaaaatatgcgtatcgaccgccatgacgggatggccgaacgccgtgttcaatacgacgtttgccgttttgcgccccacacccggcaatgattccaaagcctcgcggtcttccggcacttcgccgttgtatttttccagcaggatgcggcaggtttgcataatgtgtttggatttggttttatacagcccgatggttttcgtgtattccatcacgccgtccaaacccaaatccagcatcgcctgcggcgtatcggcaacgggaaacagcttcgccgtcgccttgtttacgccgacatcggtcgcctgcgctgaaagcagaacggcaattaaaagctcgaaaggggagttgaaattcagctcggtggtcggatgggggttggcggcgcggaagcgttcgaagatttcttggcggatgtgtctgttcatttttttatacggtgggtttgtgtgttcggcattataacgtatggttcaggcggcgtaatattgcattccccacagaatgaaggcgtaacgcgccgttttgccgataaccagcatcagcccgcttgtccacggattcaaccgcagccagccggcggcaagcggcagtgcgtcgccgacgacgggcagccaggtaaacgcaagcagccaaataccgaaacgccgcatcagattcagtgttttttcagacggcatttttcgggagggcagcaaacgccccatccaataggaaaccatactgcccaatccgttggcaaggccggcgcacagcaacgcgccgtatgcgtgttcgggaaagcggtggacgaacagggcaaaggcggcttcggatgtgccgggcaggagggtggcggaagtgaatgcggaaaaggcgagggcggcgtaggtgtaggagggtatcattgcaaacagtctcaaacaggtaacaatcggcgacggattgtacggtatagtggattaacaaaaaccagtacggcgttgcctcgccttagctcaaagagaacgattctctaaggtgctgaagcaccgagtgaatcggttccgtactatttgtactgtctgcggcttcgtcgccttgtcctgatttttgttaatccactctattttcacgcccccgccgaagggcggaggacggtgcaaaaaatacggcacagccgtatgccccttttttgtcgggcatacgacattctttccgctccggttttgatgccacgatgcggcatttccgaattttccggatacggcggcggattttcattttattgggaacggtttttgcaagtccgccggaattttttaaaatctattaaaatctatgcaagcaactgtaaaatattaatttctgctgcttgaatttcagatcggcgcattgcctgcatccgataaagtttgcaaaatgttcaaatatcagtatgatttgcattgccgttaagaaatgtcaatttctattttcttgaaacgggtaatattccgacaccacgaaaggcaaatcatgtctgcgcaatcacaaaacaatcatacgtccccattggtcgtcttgaccacgctgttcttcatgatgggttttattacctgcatgaacgacatccttatccctcatttgaaagaaattttcgacctgtcttacgttcaggcgatgctgatccaattctgtttctttaccgcctatgcggtgatgtccatcccgatgggggcttttgtcggcaaagtcggctacaaaaacggcgttatcggcggctttctgctgacggcggtcggatgcctgctgttttatcctgctgcgggcagccattcttacgcggtatttttgggcgcgttgtttattttggcttccggcgtaacgctgcttcaggtcgccggtaatccttatgttaccctgctggcgaaacccggcaaggaatcggcaacactgacgctggttcaggcgtttaacgctttgggtacgaccattgcgccgcaaatcggcgcgttcctgattctggcggacgcaacccaaaccgtcagcaaggcggaacagatttcttccgtacagattccctatttgggactggcggggctgctgattatccttgccgttttcgtgaaaatgatccggctgcccgacgcgcgcaaaattgccgccgaggaaagcgcgcacaaccacgacggcaaaaccagcgtatggcaatacaaacatctcgtgttcggtacggcaggcattttctgctatgtcggcgcggaggtgtctatcggttcgttgatggtcaacgtattgggttatctgaaagggctggatcatgcttctgccgcgcattacctgtcgttctattggggcggcgcgatggtcggacgtttcctcggttcggcggtgatggcgaaattcgcgcccaaccgttatttggcgtttaacgcatcggctgcggtcgtactgcttgccgtcgcgatggcgacgggtagcggcaatgcggatgtggcgatgtggtcgctgcttgccatcggttttttcaactcgattatgtttccgacgattttctctttggcaaccaaaggattgggaaaatttaccaacgcggcttccggtgtactgtgtaccgcgattgtcggcggtgcggtcgttcctgtcgtgcagggctgggtggcagatacttacaccctgatgtcttcgtttgtcgtttccgtcatctgttatctgtatatcgtgttttttgcggtgtacggatatagggcggacaaataatctttttcttgagaaatgtcgtctgaacatctttcagacggcatttttgcgtaccggtgtttgcggcgtgtgtgccgaggttttaatacttcaatccataaaagtcttatatgtcaacaaacaaaaaaataaaaaattatatttcaaaaaaattaatttaaattgagaaaattgccgttttgtttctgtccggcttttgtaaaacgctaaaatgccgtctgaaaacgtcgggcggattcggtatggtgtgttagaatccgttaactttatatcaaatcgggcaaagaatcatgttcgctttcaaatccttactcgatatgccgcgcggtgaggcacttgccgtcgtcgtcgctctgattgccgcgatgggctataccatcatttcattggagtggttgccgcatatgtccattattgccgccatcgtcgtgctgattttgtacggcttggcgcgcggtttgaaatacaacgatatgcagcagggcatgataggcgcgttgaatcagggtatgggcgcgatttacctgtttttcttcatcgggctgatggtcagcgcgctgatgatgagcggcgcgattccgacgctgatgtattacggtttcggactgatttccccgacttatttttatttttcctccttcgcgctgtgttccgtcatcggcgtgtccatcggcagcagcctgaccacctgcgccactgtcggcgttgcctttatggggatggcggcggcgtttcaggccgatatggcgatgacggcgggcgcgattgtttcgggcgcattttttggcgacaaaatgtccccgctttcggatacgacgggtatttccgcgtccatcgtcggcatcgacttgtttgagcacatcaaaaatatgatgtacaccaccatccccgcgtggctcattagtgcggcactgatgctttggcttttgccgaatgtcgccgcgcaggatttgaacagcgtcgaatccttccgcagccagcttgaagccacgggattggtgcacggctattcgctgattccgtttgcgctgttggtcattttggcattgatgcgcatcaacgccgtcgtcgccatgctctttaccgtcatggttgccgttgctgtaacgtatctgcacagcacgcccgatctgcgtcagctcggtgcgtggttttacggcggctacaaactcgaaggcgaagcgtttaaagatgttgtcaaactgatttcgcgcggcggtttggaaagtatgtttttcacgcaaaccatcgtgattctcgggatgagtttgggcggactgttgtttgcgctcggtgtgattccttccctgttggaggccatccgtaccttcttgacgaatgccggacgcgcgacgttcagcgttgccatgacttcggtcggggttaatttcctgatcggcgagcaatatttgagtattttgttgtcgggtgaaacgttcaaacccgtttacgataagctcggtctgcattcgcgcaatctgtcgcggacgctggaagatgcggggacggtgattaacccgctcgtaccgtggagcgtatgcggcgtgttcatcagccacgcgctgggcgtgccggtttgggaatatctgccgtatgcctttttctgctatttgagtttggctttgaccctgttattcggttggacggggctgactttgagcaaaaaataagcggataagcgaaatgccgtctgaaacttgcaacggtttcagacggcatttttatgtttggcggatggggcggattgaaacagaaaacgcccgtaccgtcatcctaaactgtgcagaaacggcggtgcttacttcacgcgggtcgccatcagcgtatgcaggcggcggttgtcggcgcgtgcgacggtgaactgcaaaccgccgataaggactttttcgccgcgcacgggcagatgtcccaactcttgaatgaccaggccgccaatggtgtcggcttcttcgctgctgtattccgtgccgaagaaggtgttgatgtcttcgatttcggtagctgcatggatgcgccagcgttcggaagaaacggcatggatattgtcggcgctatcgtcttcgtcaaactcgtcttcgatttcgccgacgatttgctcgatgatgtcttcaaaggtgaccaagccggatgtgccgccgtattcgtcgatgacaatcgccatatggttgcgctgttcgcggaactcttttaaaagggcggtcagcgatttgccttcggggacgaagacggcggggcggagaatggatttgaggtggaactgctcggggttaaacatatatttgagcaggtctttggcgtgcaaaatgcccaaaacttcgtctttgtcttcgccgatgacggggaagcgcgaatgggcggtatcgataacgtaggcggtgatgcgctcgatgctgtcgttttcttttaaaacgttcatacggctgcgcgtaatcatcgcgtcgcgcacttccaaatcggaaaaatcgaggactttttccaatcttaaaagcgtatccgcatcaaaaacttcctgctcgtgcgcctgccgaagcaggtttaatacgtcttcggcggaatcgggttcgcgggcgagtcgggcaatcaggcgttcaaaaaaattcgttttcggttgtgcgccgtccattttaatgtcagtcctcttggtaggggttggggaagcctgccgcccgcatcaggcggatttcttcggcttccattatttcggcttcgtcgtcttcgatgtggtcgtagcccatcaggtgtaaagtaccgtgtatggtcaggtgggcaaaatgctgctcgggtgttttgccttgttcggcggcttctttcaaaaccacttgcgggcagataatcaaatcgccgtacagtttttccgaaacttggcagggcaggatttcgccttcgttgagcgcgaaactcaatacattggtggcgtaatctttgccgcggtagtcgcggttgtaggctcgggcttcttcttcgtccagaagaatcaggctgatgtcggcgcggcggtattcatttttcaaggcagaccacgcccagcggtagaaatcgcgttcggctgggatgccggcggcggaagaggcgttttcaaagttcaaatggaaacgttgccgctgcaacgttaagaaagggtattttttggtgcgtttcattgtggcgggtttcgtgttttgtgggtgtaaatataacatagacctgacggtgccgtctgaagaaacgttcaaaatatgatagacttcacgccgtttccattctttgaacgcattgaacatgaacccgaaaaaactcgtcatcgccagccgcgaaagcctgcttgctatgtggcaggcaaagcatatccaaggccgtctgaaggctctgtatcccgattgcgaagtcgagattttgggcatgaccacgcgcggcgatcagattttggacaaaactttgtcaaaagtcggcggtaaaggcttgtttgtcaaagagttggaacaggctttatatgacgggcgcgccgatttggcggtgcattcgattaaggacgtgccgatggatttgcctgaaggtttcgcgcttgccgccatcggcgaacgcgccaatccgtttgacgcgtttgtgtccaaccaatacacgcgtttggaagaaatgcccgaaggcgcggttgtcggcacatccagcctgcgccgcgaagcccagttgcgtgcgcgctatccgcatttgcttatcaaacctttgcgcggcaatgtgcaaacccgtttgtccaaactcgataacggcgaatacgacgcaattatcttggctgccgccggtttgcagcgtctgaaattggacggacgcatccgcatgattttgtcggaatccgacagcctgcctgccgccggacaaggcgcattgggtatcgaaattgccgcgcaccgcgaagatttgtatgaagttttgaaacccttgaaccacggtgttaccaatgcctgcgttaccgccgaacgcgccctcgcacgcgctttgggcggaagctgccaagtgcctttggccgcatattgcacggaagaaaacggcttgctgaccttgcgcggcttggtcggacaccccgacggttcggttgtgttgcgggcggacgcgcaagcccctgccgaatatgccgacgcgctcggacgcgctgtcgctaagaaattggcggacgacggtgcgcgggaattgattggagcagtattgaatacggaaaattgattttatcgaaaatttaaataaaataatataagttattgtttttaatcaatttgtttcatcagtttcactcgccttatttcgtcattcccgcgcaggcgggaatccagtttgctcggtttcagttgtttctaatcaattcttgcagcattggattcccggattcccgcctgcgcgggaatgacggcggaaaggtttttgtggcttcggataatactgtggcgttcaaattttgaatttgagaatgatgatattcgtattttttatttgagttcatcatatttggttgattttatagatgtttttagcttgtttgaaattgttatggtttattgttttttaacaaaaaacagatgccgtctgaactggttaaggttcggacggcattttcatatggctgtgctttttacagtactttcacgatgctttcgcacagataatcgatgttgttgtcggtaatgccggcgacgttgatgcggccggagcggacggcataaatggcaaactcgtttttcaggcggtcgacttgttcgggagtcaagccgctgaaagagaacataccgttttgtttgataatgaaatcaaagttttggcttgcacctttggctttgagcaacccgacaaatttttggcgcatggctttgatgcggccgcgcatttcatcgagttcggcaatccattgtgctttcaaatcatcatttttcaacaccagcgcaatggtgttcgcaccgtgtgaagccgggttggaatacaaggtacggatgatggttttgacttggctgtgggcgcgggctgctgtttcttcatcttcggccaccaaagtgaacgcgccgacgcgctcgttgtacataccgaagtttttggaataagagctggcaatcagcaattctgtattgtgtttcaagaacacgcgcaagccgtaggcatcttcttccaaaccattgccgaagccttggtaggcaaagtcaaacagcggcaaccagcctttttcggcagaaagttttgccaaagtttcccattgttcgggcgtagggtcgatgccggtaggattgtggcagcagccgtgcagcaggacgatgtcgcctttttgcgcttggctcaagtcctcaatcatgccgtcccaatccaaaccgtgtttggcggcatcatagtaacgataaggtttgtcttggataccgaccgctttggcgatggcgttgtggttgggccaagtcggattggaaatccagatggtttgcgcgttcaactggcgtttggcaaactcggccgcaatacgcaatgcgcccgtaccgccgaggctttgcgctgttttggcgcgacggctggcgatgatttcgtggtctttgccgaacagcaggatttgggtttgcgcgttgtagtcggcaacgccgtcgatggtgaggtagtttttggtggtttcgctttccaacaggcgtttttcggcttctttgacggctttgacgaggggtgtcgcgccggatgcgtctttataaacgccgatgccgaggttgactttttcggggcgggtttcggctttgaacgcttcgcccaaaccgagaatcggatcggcgggggcggcttcgatgtgcttgaagaacatagcttgctccttgatggggacggaaggtcattcgggtttgccgattttacgctgttttacacgggctggaaacagacgcaatcacgcctgcccgatatgggcgaaggtttcccagtttgactgtatgtgttctgcaagcaggggcaggtcttgttcggcggcttcgtagtatgcgccgtcccattcttcaaattcggggaactgtttgcgcagggaagggatgtctgcgcctccgtcggcgagcgtttcgatggttttgccgtgttgttcgtagagggctttggctttgtccaagactttcggcacggctttgattttccagcggcgcaggctgtcggcaagcgggttgcggaaaatatattcgccgtaaccggatgcgatgagttgcacgaagccgccttcttcgacttggctgtcgaggtagcagaatgcggtcagcgtgtgctggtcgtcggacaggcaggagagggattcgtcgccggtttgggcggtgtgttcgaggtaggcggaaacgagggtatagagcagggcggatggctcttgttggcggatgtcttccggaagggtaagcgcagtcatggtatgccgtctgaaaagtggggattatagcggattgcggctttgcgccgaaaatatcctttagcctgccgatggcgtaaaataggcgcacgccaaccacgcaaaggaaaatcaaatggacaatctgaatccgcaggaaatttccgtgttgccggaaaatctgccgctgtattgctcgggacccggcaacgagcagtggaacgggcatccgagagtgtttttgcctttgtgcgaaggagaatcgggcagcgttgcctgcccgtattgcggcacgcgctaccgccttgacggcaagatgccgcatcatcattacgcctgaacgcaaacggcggaaaaatgccgtctgaagcctttttcggtttcagacggcatttgtttggcggggcgggcttgttccggcaccgggattctgcccgacgcgccgcccagacggtgaacggcggtttccgttccccgcgtgctgccgctatggatggtggcgtttcgcctagaggaagaaaatcattgccgcgacgacggcaatcacgccgtaaatcgccatcgggataacggttttcttgataatcgcaccttcggaatttttcacatccaatacggtacatacggcgatgatgttgttgaggcacaccatattgcccatcgcgccgccgacggactgcaacgccagaatcagggtaacggacaggccggtatccaaggcgatttgctgctgaatcgggccgaaggtcaggttggacacggtgttggaaccggagaagaacgcaccgatcgcgcccagatacggcgagaaataaacccagtgttcgcccgccattgcggcaaattccttaccgatgattttcaccatcgaattgtcgccgccgaccagcatcagctgaaccataatcagcgcgcccatcagggcaagcagcggttttttggtttgattgaaggttacggaataaatcgtccaggcatctttgaatttggttttatacagcaggatgcaaatccaaacggtcagcacaaacggaatccaagccgggacgtacagcgtttggtaagacgcgctgacatcttgtccgaaaatattgccgaaggtaatcgtcagggagtcgctgacggtgattttggacaaatcaaacggcagttggaagctgaaccattcttctttgctggtcaaaatgcctttgatgccgagctgtttgatgcgcgtaaccaccagcatgccgatcagcatacccaaaggggcgagtgctttggcgacttgggcgaacggcactttttcggcattcgggtctttggcgtggtctttgctcaagccccagccttggttggcggcgaatacggacaccatcaggccgatcgcgccggcgacgagcgacgggaattcttcgttgaccatcgccaatgcgacataaggaatggtgcaggagaagacggcaatggcgacgaagcccaagtttttgcggatttcagaccaaggtacgatgaagcccaagccgatgacggggatgacgaaacctgcgaagaagtgcattacgccggtctgcctgccgatggcgaggatgtcttcggcactcaggttcagcggtgcgaaaccgaaccaggtcggcgtaccgaccgcgccgaaagagacggggacggagttcatcaccaaagtgaaaatcgccactttcaacgggttgaagcccaagctcatcagaatcggcgcggcaatcgcggcaggcgtaccgaagccggatgcgccttcaatcataaaggcaaaagcccagccgataatcatcagttgcgctacggggttcgggctgatggtcgccagccatttgcggatgacatcgatgcagcccgtggtttccatcatacggttgaacataatcgcgccgaaaatcacggtaatcggcgtgagcgttttgacgaggccggaagcggcggtggcgttgagcagcatgcccgcatcgtcgaagtagaaaagtttgatggcgtaaatcagcactgcggtaatcggcagcgcgacgtaggagggcatactgttttttttcaccatcagccaaatcagcaggacgatggggaatatgctgaggaaaagtgccataacgaatcctttttaggcatttgcatcataaggcgcgtcgaggtttggaaagacgttcaaatcccgtacacccgatattttggttaaaagataaattggtaagaccaattgttatgcgtttgcacactttacgtaatcttatgtaatcggtcaagcattttatcgataatggctattaatgcgggttaaggatagtgatgatgcggcggagggagtgtgggaaaggggcgtgtaaaaaaagccgcccgaaaggcttcagacggcattttcagtatttttccagcggcacgaataccgcgccgtccccgtccacgcggaggattgaagcatagtcgttatgccagtcgcccaaaacgatgcgggtaaagccgttttcgtgatggatatgctcgcggtgggtgtgtccgtgtatcagcctttccgcaccgaaggcgcgtacctgccgcgcggtaaaggcggcattgacatccataatatcggcgggcttgacctgtttttccattttgctgacacgcctgattttggtggcaaggcgcgtgcgccacttcaggggcagcattaggaacagtttttgcagccgcttccgatgcacgattttgcggaaacgttggtatgccctgtcatctgtacacagagtgtcgccgtggcagatgagggttttgcagccgaacaagtccaaaaccgagtaatccggcagcagcgtcatgcccgcctgccggcaaaaatcctgaccgatcaggaagtcgcggttgcccctgacgaagaacacggcaacgcctttgtcggacaatttcctgatttcacgcgcaaccgaagtattcaactcggaaacttcgtcatcgcccacccaaaaatcaaacaaatcgcccaaaatgtaaatcgcccgcgcctgcccggcggcggaagaacgtaaaaaacgcagcagcagcgcggtcagttcgggctgcttttcgctcaaatgcaggtcggaaatgaaataggcgggtttcataggcaggtttccaatcgggcggatgtcggggcggattataacgcgcccggcggcggggcaatacggcaaatgccgcgccaagcatcgggcattggcggaaccggggttcgggcgcgttaaaaatgccgtctgaaggcttcagacggcatcgagggtgcgggatgcggtaaggttttgccggcaagatatggggtggtgcggcgggatttccgttaaaatacgcttcttttttattttttccgaccattatgcgcctgacccatatcaaactctccggcttcaaatcttttaccgacccgaccacgattcatgtgccggggcagcttgtcgcggttatcgggcccaacggctgcggcaagtcgaatgtgattgacgcggtgcgctgggtgttgggcgaggcttcggcgaagcagcttcgtggcgagagtatgcaggacgtgatttttaacggtgcggcgacgcgccgtcctgcgccgagggcttcggtggagctggtgtttgacaacagcgaccacagtttgcagggggcgtgggggcagtatgccgaggtgagcatcaagcggcagctgacgcggcagggcgaatcgacttatttcatcaacaatcagaccgtgcgccgccgcgacattaccgatttgtttctgggtacgggcgtgggcgcgcgcggttatgccgttatcgagcaggggatgatttcgcgcatcatcgaagcgcggccggaggagttgcgcgcctatatcgaggaggcggcgggcgtgtccaaatataaggaacgccgcaaggagacggaaggtcgtctgaaagacacgcgcgagcatttgcagcgtttgggcgatttgcagaacgagttggcgcgtcaggtggaaaagctggaaaaacaagcggaaaccgccgaacgctacaaatccctgaccgcgcagctgaatcagcaacaggatttgctcgattacgcccaatggcggcaatcgcttgccgccgccgataaggcgaccgcgcagcatcaatctttgcaggcgcagcaggacgaaaccgccgcgcaggttcaggcgttaaacgacgaagtacacgccttgcagactgccgaacagtcgcagcagcaggcagtgcatgaattgagcaacaagcgcggcgtgttgcgcgagcagattgcccgtttggaagaacaaatccgccatcagcaaaacctgcaccaacgcatcgaacgcgacaagcaggcagcgcaggcgcagttacaacgcattcatcaagagcagcagcaaatccgcgtgcagcttgaagaaaacgagttgcaggtcgaagaaaaacaaaccgagctggcggaatgggcgatgcaggttgccgaacacgaggagcgtctgcccgaattggaagaagcccaagccacgctcaacgccgccttccaaacccagcaggacgaggcaaaccgcatccgccgcgaactggcgttgaagcagcagcagcttgcccatgccgaacaaacgattgccaagcacgaagagcgcaaaggtcgtctgaaacaggaaaaccaagccttaaacctgcccgacgaagccgaaaccgccgccgcgcaggaagcagccgccttgttgcaaagtcagcaagagcattacgaagaacaaatcattgccgccgaagaagccttacacgccgcccgcgaggcgtttcagacggcctcaaaccgcttccaaagcctgaagcagcaacacatcaccttgcaggcgcagcagcaggcgttgtcgcaaatcctgtcgcaacagcaggaagccgccgatttctggcaggcaaccgaccacgccgccgcgccgcaactgtggcaacacatcaccgcgcccgccgagtggcagcacgccttgtccgtcattcttgccgaacgcctgcacgcccgcgccgtgccgcaaggtttcgtgccgcccgagcctttgccgcaggggcaggcggcatggctttcagacgacctctcaggcggcatcaaaaaatccctgcccgtacaggcattgctgaaccaaatccaagcgcagccgccgtttcagacggcattgcactactggctcgacggcgtattgtgcgcgcccgatttgagctatgccctcgcgcatcaaaacgatttgggcgcacaccaaatctggctcacgcccgaaggtcatcaggtcgataaagtcagcgtcctgctctatgccaaacccgcgcaggaaagcctgattgcccaaaaagcgcgcctcgacggcatcgcgtccgaactggaaaacctcgcccccgaactttccgccgccgaagccgcgttcaaacaggcggaagctgccgtgcgctcgtctgaagtgcaacataaaaacctgatgcagcagcaacagcagcacacgcgccaatacagtcaagcacagcaacgcgccgccgaactcttagcgcgtaccaaccaagggcaaatccgccgcgaacacatcgagcgcgaactggcgcagttggcggaagaacagaccgtgttgcaacacacgtccgacgggctttcagacgacatcgttaccttgcaggaagccgccgccgaactcgaacaccagcagcaaaccaccgcgcacagccgccaagagcagcaaggccgtctgaaacaggcgcagcttgccctgttggaagccaaccgccaatacgggcttgccgaagtcgccgtccacaaactcaaccagcaaaaacaaaactaccggcagcaaatcgcccagcttgaacagcaaaccctcgactggcaggaacgccagcaagagcttgccctcgcctatgaaaccgagttccaaaacgacgagcagcacatcaagcttgaagaattaagcgaagccgtacagaccttggacgaagaatatattgttgtgcaagagaaactcgcgcagattcaggaacagggcagggagcaatacgctaaagtgcaaaccctgcaaaccaagctgccgcagcttcaggccgccacccaaaccgccttgttgcagcagcaggaagccctgatcaacgccaaacgctaccatcaaaacctgaccgaacgcgccgccgatttggacgcgctcgaagcgttggcgaaagaatcgccgaaagtattgaacagcagcatcggcagcctttcgcaacaaatcgaagcactcggcgcggtcaacctcgccgccctgcaagaactcgaagaagcgcgcgaacgcgacggctactaccgcagccaaagcgaagacgtgcaggcagccatcacccttttggaagaagccatcgcccaaatcgacgacaaaaccaaagcgcgtttcaaagaaaccttcgatgccgtcaacagcaaagtccaaaccttcttcccgaccctgttcggcggcggcgaagccactctcaaaatgataggcgacgacctactgaccgccggtgtgtccattatggcgcgtccgcccggcaagaaaaacagcaccatccacctcctctccggcggcgaaaaagccctcaccgccatgagcctcgtgttcgctctgttcagcctcaaccccgctccgttctgccttttggacgaagtcgatgccccgctggacgacgccaacacctcgcgtttctgcaggctggtcaaagaaatgtcggcgcaaacccagttcctctacatctcccacaaccgcctgacgatggaaatggcggagcagctggtcggcgtaaccatgcaggaaaaaggtgtctcgcgcgtcgtcgccgtggacatcaaacaggcgttggaaatggcggaagccgtttgaacgggttgcagaacggctgaatcttgccgtttttaatgaagtgttgcgatatgggttttcagacggtatttcaaacagaacagattaaaatcaaatccaaatccataaaaaatgccgtctgaacagcgttcagacggcatttcgatgtgtactgccacgtcaaatcagtggtgatggccgcagccgcattcttttttcatatcgatcaccatacggccggtgattttgccttcgcgcatttcttggaaaatggcgggtgcttcatccaaagcacgcagttggactttcggcacaaccaaaccttccgcgccgaattggaaggcttcttccaaatctttgcgcgtgccgaccaaagagccgaccacttcgatgccgtccaaaaccaaacgcgggatggacaaatccatcgattccggcggcagcccgatggcaaccacacgtccgcccgcgcggacgcaattcacggcagagttgaatgcggcagcagatacggcggttacgaccgcagcgtgtgcgccgccggttttttcctgaatcactttggcagcgtcttctttggcggcgttgacaaccaaatccgcgccggtttctttggcaaacgccagtttgtcgtcgttgatgtcgatggcgacaacgtgcgcgccgaatacttttttcgcgtattggacccccaagttgcccaaaccgcccgcgccgtagatggcaatccactgtcccggacgaacgccggaaactttaatggctttataagtggttacaccggcacaagtaatgctggaagcttgcgcaggatccaaaccttcagggactttgaccgcgtaatcggcactcacgatacagtgggtcgccataccgccgtcggcggtgtagcccgcgttcaatacggaacggcacagggtttcgcggccggtattgcagtattcgcaagagccgcagctttggaacagccaagcgatgctgacgcggtcgccgactttcagatttttcacaccgtcggcaacttctttaaccaaaccgatgccttcgtgtcccaacacgcggcccggtttttcgccgtagtcgcctgccgcaacgtgcaggtcggtgtggcacacgccgcaatattcgacttcgaccaatgcctcgccgtattccaacgggcgaacctcgcgttcgattacttccacatcgcccgctacatttttattcacaacaactgcctgcattttcatgattgcgctccttagttacggcaaaaaaacctgtaaacggaatgttgtccgatataagggtaagcatacgcttccgcatctcacaggtcaagtggtatgttgttgaaaaatatagattatatgttatattataacatcttggaaaggcacggcatcggggcggttgccggatgaggggcggcaggtttcaagtttgaaaaaccggacggcaaacccgtaaagataccgtctgaagctgtgtccggacggcatctttacgggtttgcgggcttcggcggaggattagtcgaagccggggcaggattggtttgtaccggaagcggcaatggtaccgccgtcgttgagcgtaacgacgcaggtttcgccgtcgttggtggtgggattggggtcggcctgaagggtaaagtggtcggggctgacttcgcttaaagtgatatcgaaatattcgttttgtttcagtttgtttttgtcgtaggttttaaacgtccctttttggcggtagtaacgttccatggtctgcgcgttgtgcagcagggtcgtcctgacttccgacaggcggacgcgccggatgtaggttttataggaagggtaggtgatgagcgtcaggatgccgaggatggcgacggcaatcatcagctcgagcagcgtaaagcctttttgaacgtttttcatagcaatgtgtttccatttgtttgtcggtcgacggcattataacgccgtatcggaaatggcggaatatgtaaacggattgaaattttcgggaaagcagattgtataagccatttaaaacaaatggttatttttattgtcggcagtttgccgccttggatggggcagggacttgcggtagaatccgcttccgatttatgggattgacgcatacagagaattgaaaacatggcaaaaatgatgaaatgggcggctgttgcggcggtcgcggcggcagcggtttggggcggatggtcttatctgaagcccgagccgcaggctgcttatattacggaaacggtcaggcgcggcgacatcagccggacggtttctgcaacaggggagatttcgccgtccaacctggtatcggtcggcgcgcaggcatcggggcagattaagatactttatgtcaaactcgggcaacaggttaaaaagggcgatttgattgcggaaatcaattcgacctcgcagaccaatacgctcaatacggaaaaatccaagttggaaacgtatcaggcgaagctggtgtcggcacagattgcattgggcagcgcggagaagaaatataagcgtcaggcggcgttatggaaggaaaacgcgacttccaaagaggatttggaaagcgcgcaggatgcgtttgccgccgccaaagccaatgttgccgagctgaaggctttaatcagacagagcaaaatttccatcaataccgccgagtcggaattgggctacacgcgcattaccgcaacgatggacggcacggtggtggcgattctcgtggaagaggggcagactgtgaacgcggcgcagtctacgccgacgattgtccaattggcgaatctggatatgatgttgaacaaaatgcagattgccgagggcgatattaccaaggtgaaggcggggcaggatatttcgtttacgattttgtccgaaccggatacgccgattaaggcgaagctcgacagcgtcgaccccgggctgaccacgatgtcgtcgggcggttacaacagcagtacggatacggcttccaatgcggtctactattatgcccgttcgtttgtgccgaatccggacggcaaactcgccacggggatgacgacgcagaatacggttgaaatcgacggcgtgaaaaatgtgctgattattccgtcgctgaccgtgaaaaatcgcggcggcaaggcgtttgtgcgcgtgttgggtgcggacggcaaggcggcggaacgcgaaatccggaccggtatgagagacagtatgaataccgaagtaaaaagcgggttgaaagagggggacaaagtggtcatctccgaaataaccgccgccgagcaacaggaaagcggcgaacgcgccctaggcggcccgccgcgccgataaacgaatatgccgtctgaacacggaaacggtttcagacggcatttgttattgatttacggaatattatgagcttgatcgaatgtaaaaacatcaaccgctatttcggcagcggcgagaaccgcgtccatattttgaaagacatcagcctgtcgatagagaagggcgattttgtcgccatcatcgggcagtccggttcgggcaagtccacgctgatgaacatactcggctgtttggataccgccggttccggttcgtaccgaatcgacggcatcgaaactgccaaaatgcagcctgacgagctggcggcattgcgccgcgaacgcttcggtttcatcttccaacgctacaacctcttaagctcgctgaccgcaagggacaacgtcgcgctgccagccgtctatatgggcgcgggcggcaaagagcgttccgcgcgggcggacaaactcttgcaggatttgggtttggcaagcaaagagggcaacaagcccggcgaactctcgggcggacagcagcagcgcgtctccatcgcccgcgccctgatgaacggcggagaaatcatcttcgccgacgagccgaccggcgcgctcgataccgccagcggcaaaaacgtgatggaaatcatccgcaggctgcacgaagccgggcataccgtcattatggtcacgcacgaccccgacatcgccgccaatgccaaccgcgtcatcgaaatccgggacggcgaaatcatttccgacacctcgaaaaatcccgaaatccccgcaagcaatgtcgggaggattcgggaaaaagcttcgtggtcgttttattacgaccagtttgtcgaagccttcagaatgtcggtgcaagcagtattggcgcacaaaatgcgttcgcttctgacgatgctcggcatcatcatcggtatcgcgtcggtggtttccgtcgtcgcattgggcaatggttcgcagaaaaaaatccttgaagacatcagttcgatagggacgaacaccatcagcatcttcccggggcgcggcttcggcgacaggcgcagcggcaggattaaaaccctgaccatagacgacgcaaaaatcatcgccaaacaaagctacgttgcttccgccacgcccatgacttcgagcggcggcacgctgacttaccgcaacaccgacctgaccgcctcgctttacggcgtgggcgaacaatatttcgacgtgcgcggactgaagctggaaacggggcggctgtttgacgaaaacgatgtgaaagaagacgcgcaggtcgtcgtcatcgaccaaaatgtcaaagacaaactctttgcggactcggatccgttgggtaaaaccattttgttcaggaaacgccccttgaccgtcatcggcgtgatgaaaaaagacgaaaacgctttcggcaattccgacgtgctgatgctttggtcgccctatacgacggtgatgcaccaaatcacaggcgagagccacaccaactccatcaccgtcaaaatcaaagacaatgccaatacccaggttgccgaaaaagggctgaccgatctgctcaaagcgcggcacggcacggaagatttcttcatgaacaacagcgacagcatcaggcagatagtcgaaagcaccaccggtacgatgaagctgctgatttcctccatcgccctgatttcattggtagtcggcggcatcggcgtgatgaacatcatgctggtgtccgttaccgagcgcaccaaagaaatcggcatacggatggcaatcggcgcgcggcgcggcaatattttgcagcagtttttgattgaggcggtgttaatctgcgtcatcggcggtttggtcggcgtgggtttgtccgccgccgtcagcctcgtgttcaatcattttgtaaccgacttcccgatggacatttccgccatgtccgtcatcggcgcggtcgcctgttcgaccggaatcggcatcgcgttcggctttatgcctgccaataaagcagccaaactcaatccgatagacgcattggcacaggattgaggttggacaaagatgccgtctgaagctgcaggaccggtcattttggagcagaaacttattggataaaaacggtttcttagattctacgttccagattcccacttgcgtgggaatgacggcggcgggggttcgatgattgcacacaacgctcgagtcccgtcattcccgtaaagacgggaattcggttcgttcggctttgcttgtttcggataaatcacggtaactcaatattccagattcccgcccgcgtgggaacggcggcggggcttcgtattgttcaatttattattttcaatcattcaatgggttaggatgtgtttgttggcttgctaactttcagggcggattggttttcaggcggcatttcccgcaaaaaaggcttggaattttccaagccttttttgcggatggattattgatttttgcggatgatttcctccagttggggcatcgggctgtagccgctttggctgcgcccgttggggaagacgagggtcggcgtgccgttgaagccgaattgttcgcccaaggaagtggtttccgcgacgggattgtcgcagatgctgccgccgaccgggaatttgcctttacgcatccaatccgtccacgctttggcgcggtcgggctgacaccataagatttgcgccttgcgcgcggcatcggggtgcaggccggcaatgggcatcataaagctgtaaaccgtcacgtcggtcattttttcaaactcgtgttccaagcgtttgcagaacggacaatcggggtcggagaagacggcgactttcagcttgccgttgccgcgcacttctttgatggctttgtccaaaggcagggaggcgaagtcgattttgttcaaatcggcggcgcgttcttcggtcaggtttttgcgcgtgtcgatgttgatgagttcgccgacgaacatatagccgccttcggcatcggtgtagataatctgcctgccgctgacgacgacttcgtaaatgcctttgaccggtgtttcgctgacgctcaacactttcaaatcttgggcggaataggttttttccaaacgcgctttcaaagaggcggcaacggatttgccggcggactcggctttgacggcgggttcggcgttggcattggaaacgggcgtttgcccgcaagccagcagcgggaggacggtaaagggggtcaagattttgattaacttggttttcatataaagatgattgcgcgtgttggaaaagcggaattgtatcaaatctctgttgcgcctgcattgcgcctaggctcaatttatcgtctgaaaatagcttccggctgttaaaatacgcaaaaaatgatttgcttgtttgtatgatttaccaccgcatcgccgtaaacgtgccgctttcagacggccttttgacttattcccattccgatccgcttcctccgggaacgcgggtgcttgtgcctttccgcaataaaaccgtggtcgggatggtgtgggaaacggatattgcgcccgatatggatatggcgcggattttgagtgttcagacggcctttgtggaagaaaagccgttgcctgaaagctggcgtgatttgttggcatttacgtcgcgttattaccactatccgactgggcaggcggtgtttgccgcgctgccgcagggtttgaaggaaacgcgcgcggtggaaatgccgcagccgccgttgttttatgctttgaacgaagcgggcagggcgcaaacgccgccaccagctcggttcaacaaaaaagcggctttgtgggacgcactgctttcgggcggaatgacgatggcagcgttgaagcaggtaaacgcgcaggcggcgaaattgattgaagattgggcggagcagggttggattgaaacaacggaagcggcgaaacctgtattgaggtcgtaccacgggcaggcttcgcactctgaatttgtgttgaatgccgaccagcaacaggcttccgatgaaattcagacggccttcggcagcttccagccgtttttgctgtacggcatcaccggcagcggcaagaccgaggtgtatttcgatgcgatggcgaaagtgttggcgcaggggcggcaggtgttgtttctgttgcccgaaatcaacctcacgccgcagcttttgaagcgggtggaaaaccgttttgccgacgtgccgaccgccgtgttgcacagtcagatggcggcaggcaagcgcacgcaggattatttgcgcgcgatgttggggcaggcgaaattggtcatcggcacgcggctggcggtgttcacgccgatggatgatgtcgggctgattgtggtcgatgaggaacacgacggctcgttcaaacaggacaacgaattgcgctaccacgcccgcgatttggcggtgtggcgggcgaagcagggcggctgcccgatcatattgggcagtgccacccccagcttggagagctggcacaaggcgcaaagcggcgcgtaccgcctgctgcaactgaccgaacgcgcccataccgccgcgcaactgccgcaagtggacatcctcaacgtaggccgtctgaaacttgacaacggcttctcgccgcaagccttgcagcttttgaaacagaactttgaagcaggtggcatgtcgttggtgtacctcaaccgtcgcggcttcgcgcccgcgctgttttgcggcgactgcggttataccttcggctgcccgaactgctccgccaaaatggtgctgcaccaacgcgcccgccaactgcgctgccaccactgcgaccaccgcgaacccatcccgtacaaatgccccgactgcggcaaccaagacctgaccgccgtcggccacggcacgcagcgcgtcgaagaaaccctgcgcaccttcctgcccaaggcagccgtcgtccgtgttgacagggacagcaccgcgcacaaaaacgactgggcggatttgtaccgccgcatcgccgacaacaaaatcgacattttggtcggcacgcagatgctcgccaaagggcatgatttcgcgcggctcaacctcgttatcgtgttgaacgctgacggcagcctgtacagcgcggactttcgcgccccggaaaggctgttcgccgagctgatgcaggtgtccggcagggcggggcgcgccgacaaacccggcaaggtgttgatacagacccaactgcccgaacatcccgtcttcgccgccgtcaaagcgcaggactacgccgtgtttgccgaaaacgaattgaacgagcggcaaatgttcgccatgccgcccttcggtttccagaccgccgtccgcgccgacgcgccgcgcgttgccgatgcgatggagtttctcaatgccgccaaagaaaccctcgccccgcttttgcccgaaagcgtttcacagttcggcgccgccccgatgctgatggtgcgcctcgccgaacgcgaacgcgcgcaaatcttcctcgaatctccgtcccgacaggatttgcaccgtgccgtgagtttgtgggcgcaggtgttgcagcaaaaccgcgacggcaaaatcagatggtcggtggatgtcgatccgcaggaggcttgattattggcaatccgatgccgtctgaaaaccgtttcagacggcatttttattccggatcgtctgtaaacgcattcgcccgaaatatcggtataaacgtgaaaagatacagtacgaatacggcggcggtcagaatcgcaggaacggtaatgaaaaatatcgggttcacgttcatcaagaaagcgcgcgagacggcggcggcgaaaaggatggggacggcaatgcggcagagtttggggtagtcgagtttggtaaagccgctgtgccacagtccggcggtcagccacaccatcatcacgccgcccatcatgccgccgagggtaatcaggtgcaggggcgcggaggcgggcaggttttgtaatttcgccgcgcctgtccacaaatagcctgcggcggcaaagagttggagcaggtaataagtgcggacgtagtgtttacgtaagagttcgtgatggtgaagctcacgcagcttggcgagcaggatgaagccgacggcgagcgcggtaaaaccggcggtttgcgcgggcagccaaagttcggcggcggcgtgcaagagcaggaaagtaatggcgatgtttttataaacgatatttggaataaaaacagggtctttcagacggcattctttcagggcttccgcgcccaaaagaatactgacgcgcacggatacgaacatcaccgccgccatatttagatgcacttgcgcgcgcaacaggttcaaatcgccgctgacggcatatgccgtctgaaaaacagtgaacgcggcaagtaacattagcagggcgaagttgtcggtgtttcggtctagccaaatcagccgggcgcagaacagcagcaacaccagccaataggcggcgacgaaaaacgaggcagtttgcggcgaaaagggcagtatagcggatgcggcgagcaataatgccgccatcaaagtcgcgacaggtttcaggttacccgaaaaacccgtccagtccaacaaagccgcagtcaaaaaaccgccgtatgccgccggcagcataagttccaagaaaatttggcggtgcaggacgatggcaccggggttgatgaaaaacaccagcgcaccgagtatggcaagcaccgccgcgccgacgaaaaacggccgcatagcaactgtatttttcaccccgtcgggcaaaaataccaaaactcaaatcaagccgtccggataccgttttcggcggtatcgttttcggcaaaataatcacgcatccgggcattcgatatcgtcagcagtttgcgcatacatgccgtaacggcaaccttatacggcttacccttggacagcaggcgttggtagaaatcccgaataagcggttcaaaacgtgtcgctgccacggtagccatatacagtgccttacgcaccgcagaccttccgccaaagcagcggcttttgaatttggtttcctcgctctccctcgggtgcggggcaatgccggccaaactcgctatccgtttgtgcgacagccgccccaattcgggcagcatcgccatcagcgtagccgtcgttatcgaaccgatgcctttgatttgctccgccacttgggctttgccgtcaaaatgcgtgtgggtgtggtcgtcgatttgtttgtccaattcgtcaatcagccggtcaaaatgggcaatcagttgtttgacgcttccgacttgcgtttcatgaacctaatgcagacggtttttctcggcagtccgcatatccaccagttggttgcggcggttaaccaaggcttccaacacttcttccacttcggtgggcgggtggtagggcatggtttgcgaaccttctttctgcgtcatcatctgtgcgaagaaggcgagcattttggcatctttggcgtcggttttggtcagcggctgcgattgggcaaactgatgcgtctgacgcgggttggcgataatcacggctatgcctgctcggcggatggctttggcggcggggatttcgagaccgccggtactttccgtcacgacgagggcgaccttgtgttttttaaggtattcgatagtatgggcgatacctttggggttgttggtttcggttttggttttagacaaagacgaaacggcgatgacgaagtttcgtttggcgatgtcgatatagtgaattaacaaaaatcaggacaaggcggcgagccgcagacagtacggatagtacggaaccgactcacttggtgcttcagcaccttagagaatcgttctctttgagctaaggcgaggcaacgacgtactggtttttgttaatccactataacagcaaccctgtcgccgtcattcccgcaaaagcgggaatccagtccgttcagtttcggtcatttccgataaattcctgttgcttttcatttctagattcccactttcgtgggaatgacggcggaaggtttttgtttttttccgataaattcttgaggcattgaaattccagattcccgcctgcgcgggaatgacgattcataagtttcccgaaattccaacataaccgaaacctgacagtaaccgtagcaactgaaccgtcattcccacgaaagtgggaatctagaatctcagactttcagataatctttgaatattgccgctgccttaaggtctggattcccgcttgcgcgggaatgacgaatccatccgcacggaaacctgcaccacgtcattcctacgaacctacatcccgtcattcccacaaggacagaaaaccaaaatcagaaacctaaaatcccgtcattcccacgaaagtgggaatctagaaatgaaaagcaacaagcatttatcggaaataactgaaaccgaacagactagattcccgcctgcgcgggaatgacgaatccatccgcacggaaacctgcaccacgtcattcctacgaacctatatcccgtcattcccacaaggacagaaaaccaaaatcagaaacctaaaattcgtcattcccgcgaaagtgtgaatctagaaatgaaaagcaacaggcatttatcgaaaataactgaaaccgaacagactagattcccgcctgcgcgggaatgacggctgcagatgcccaacggtctttatagtggattaacaaaaatcaggacaaggcgacgaagccgcagacagtacagatagtacggaaccgattcacttggtgcttcagcaccttagagaatcgttctctttgagctaaggcgaggcaacgctgtactggtttaaatttaatccactatataaaaaatttccagagaaccgatacaacagttggaacttgggtttgggaatattacggtagatgaacttggaacctctgttatgctatggtcttttatctcaattgaaaaaagcgcgaatcaaacggttcgcgcttttttcagacggtattaattattttttgtcgtcttttacttcttcaaagtcggcatctacgacatcatcgtctttctttgcagaagcattggcttgttcgctttcgcctgcttgggcttcagcttgtgcttgagcgtaaaccatttcccccagtttttggctggctgcgcccagcgcctcggttttggcatcgatagcggctttgtcgtcgcctttaactgcttcttcggcttctttcagcgcggcttcgattttttctttctcggctgcgtcgagtttgtcgccgtagtcggccaaagattttttcacagagtgaatcagggcttcggcttggttgcgggaagcgaccaattcagtcagttttttatcttcctcggcattggcttcggcatctttcaccatgcgttcgatttcttcttcgctcaaacctgaagaaccttggatggtgatgttggctgctttaccggtgcctttgtctttggcggaaacgtgcaggatgccgttggcgtcgatgtcgaaggttacttcgatttgcggcataccgcgcggtgcaggtgcgatgtcgcccaagttgaactgacccaaagatttgttggcagaagcgcgttcgcgttcgccttgcagtacgtggatggttactgcgctttggttgtcttcggcggtagagaacacttgcgacgctttggtcgggatggtggtgttcttctgaatcagtttggtcatcacgccgcccatggtttcgatacccaaagacagaggagttacgtccagtagcaatacgtcgctgcggccgccgctcaatacttcgccttggatcgctgcgcctacggcaacggcttcgtcagggttcacgtctttgcgcggttctttgccgaagaaggctttaacggcttcttgtactttcggcatacgggactgcccgccgaccaagattacgtcgtcgatgtcgccggtgctcaagccggcatctttcaatgcaattttgcaaggttcgatagagcgggtaatcaggtcttcaaccaggctttcgaatttggcgcgggtaattttcatcgccaagtgtttcgggccggttgcgtccatggtgatgtacggcaggttaatttcggtttgctggccgctggacaattcgattttggctttttcggcagcttctttcaggcgttgtagagccatcacgtcttgtttcaaatcaatgccttgttcttttttgaactcggcgatgatgtggtcgatgaggcgttggtcgaagtcttcaccgcccaagaaggtatcgccgttggttgccaatacttcgaattgtttgtcgccgtcgaggttggcgatttcgatgatggaaatatcgaaagtaccgccgcccaagtcatatacggctactttgcggtctttgttgtcgcctttgtccataccgaatgccaaagcggctgcggtcggctcgttgatgatgcgtttcacgtccaaaccggcgatacggcctgcgtctttggtggcttgacgttggctgtcgttgaagtaggcagggacggtaatcacggcttcggttactttttcgcccaagtaagcttcggcggcttctttcattttacgcaggacttctgcggaaatttgaggaggagacagctctttgccttgtgcttttacccatgcgtcgccgttgttggctttgatgatttcgaaaggcatagattcgatgtcgcgttggacttctttgtcttcaaatttgtggccgatcaaacgtttggcggcgtaaatagtgtttttggcgttggttaccgcttggcgtttggcaggcgcaccgacgaggatttcgccgccgtccaaataagcgataacggacggcgtggtgcgtgcgccttctgcgttttcgatcactttggtttgaccgttttcggaaatggccaaacaagagttggttgtacctaagtcgataccgattacttttgccatgtggataatcctatttgattttgcttattttgagaaatatgttggaacattttgtcccgatgggctgtaaatagggcgggcggcgggctgtttcaagctacagcatggctataagtatataactttatgaatatattggttttatatttgatttaatacatttggctccaatgcattcaagcataatgtttcaaatggcaggcaggtttattcatagacgatgccggcgagcatttcctgttcgttcaagttgccgtactctttttcccagtcgtgtgaagactcgatgatgtcgcattctttggaaagggagacttgttctgcatccatatctttggcgttcagtatgttgaattgttcgcacagggatgcggataaagtgatgtcgggctgtttggcttcagaacggttttcttggaaggcaaagcagaatgcggtaaatgccgcagtatagataagatatttgccggttttcttcatttttctatcctttttctgtcaattcaggattaaacctatggaaaaatctgaaaaattatgtattaagtaagaaaaatcataatttaaatttagtttatcataattgttccgttttttggatagctaaggtaaaatatatttcatgtttactttagatgattgaatgaaggggagtggaaggatatttatggaaacctttaaagacagactggtttttttatggaaaagcgaagcgaggcaggcaaaaatcgcatccgatattgaaatgacgattgcgggcttcagcaggatatggaatgaaggcggtctgccaaagtctgaaacattgaaaaaaatcaagcagttgaaggggtgtagtatcgattggctgctgaccggggagggtaatccgtttccggatgaagccccaaaaaaatcccttgcttacgatactttgggcaatgaagtcgatacggacgagtttgtcttcgtgccgagatatgatattcgggcggctgcgggatacgggcagtttgtcgatcatgaggaaccggtatttacaatggcgttcagacggcattggattgagaattatgttacccgcgatacgaaaaacctgtctgtaatttccgtcaagggggattcgatggagggggttttgaatgacggcgattcgattttggtcaatcatggtgaaaatacgccgagggacggtctgtatgtgttgcggattaatgaaaatctgctggttaaacgtttacagattgtaccgggcgggattatcaatgtgatttctgcaaacgaggcttatcctgcttttgaaatcaatttgaacgatttgaccgatgatgtggagattatcgggcgtgtcgagtggttcggcaggacgatttgagtttggggcttgaaattgcaggcggtcaaacttatctattggaacaattcctttttcaaaggcgaagcctgcttgcctttgaagggggtttgagagagaatgcagaaaatattatattaaggaataacaccatgtcggatgaaagccctattatttttactgacagctgctgtgccaaagttgccgatttgattgccgaagaaaacaatcccgatttgaaattgcgggtttttgtcaatggcggcggctgttcgggtttccagtacggatttacttttgacgaaatcaaaaacgacgacgattttgaaattgagaaaaacggtttggtctttttggtcgatccgatgagctatcaatatctggtcggtgcggaaatcgactatacggaaagtttgcagggttcgcaattcgtcatccgcaatccgaatgcggaaacaacctgcggttgcggatcgtcgttttccgtatgaccgcttggtttgtgtgatgccgtctgaacgttcagacggcatttttacttttagaaaatatattatcgggatgaattcacatataatccgattgtttgaagatgaatcgggtttcccgaaaggaacgggcggaacggtatcaggcgtatttgttcccttatgattgagatgagtaaagattaccgaaacgatttgtacgatgtatatgtttcttacccgccccaagtggatcgcgggcttatccgggagtgccttaaggagaatctcggcgaggaaaaggcggaaggattgatcgaatcgctcgattccaaacctcaagtgctggttgaggaaaaatgcacttgggcgaaacgggaagagttgcatgattatttcagctatttgggtttggatattattacccggagatatatggagttggaaacggtcgtgccgccggaggaaggggagggcgaaggagaaggcgcggatggggaaatgcccgaatatcttgaacttcacggcgggcgggaagatgatatttccgcaccttcgcaacccgaaccgccgtcccgcaatatcaaactgctggttttcgggctgctgattgcctttttgggctatctgctcggtaagattttttgattgtccgataaatgctgtattcgggattttatatatgaaatggttgaaacgcctgacggttattgtcgggactttttaccgctatcggctggcaggtctgtgtgcttcgctgatgggtagcggttggatatgcgctctgctgaaaatgatgccgcagtcgtccaaattgaaaaacgaaccgcctgctgtccgtctgcgccttgccttggaaagcctggggccgattttcatcaagttcgggcaggttttgtccacacgccccgatttgattccgcacgattacgccgtcgaactggcaaagctgcaagacaaagtgccgccttttgacgcgcggctttcgcgtgaacaaatcgaaaaatcgttgggtcagtccatcgaaaagctgtatgcggaatttgaaaccgagcccatcgccagcgcgtccatcgcccaagtacacaaagcccgcctgcattcgggcgaacaagtggcggttaaagttttgcgccccaaccttttgcccgtgatcgaacaggatttgtcgctgatgcgctttggtgcaggctgggtcgagcgtctgtttgccgacggcaagcgtctgaagccgcgcgaagtggtggcggagttcgacaaatatctgcacgacgagttggacttgatgcgcgaagccgccaatgccagccagctcggacgcaatttccaaaacagcgatatgctgattgtgccgaaggtgttttacgactactgcaccagcgacgtgctgaccatcgaatggatggacggcacgccggtttccgacatcgccaaactcaaagcagacggcatcgatttgcacaaactcgccgattacggcgtggaaatcttcttcacgcaagtcttccgcgacggctttttccacgcggatatgcaccccggcaatattttggttgccgccgacaaccgctacatcgccctcgatttcggcatcgtcggcacgctgaccgattacgacaaacgttatctcgccatcaacttcctcgccttcttcaaccgcgattaccggcgcgtcgccaccgcccacatcgaatcgggctgggtgcccgccgacacgcgcgcggaagagttggaagcggctgtccgcgccgtgtgcgaaccagtgttcaacaaaccgatttcgcagatttccttcggcttggtgctgatgcgcctgtttgaagtcagccgccgcttcaatgtcgaaatccagccgcagctggtattgctgcaaaaaacgctgctcaacatcgaaggcttgggacggcagcttgatcccgatttggacttgtggaaaaccgccaaaccgtttttggtgaaatggatgaacgggcaggtcggccctaaagccctttggcgcaacctcaaaaacgaagcccccgactgggcgcaaatcatcccttcattgccgcgcaaaatcagtgcgttgattgatgaaaaccgccagcaggaaatgcgtgatgcctatatccatttggtcaaagtgcagcagcggcaaagcctgtggctggctgtgattgcggttgttttgctgctgattttgcttttgaaataggctttgtccgaatcatcgcccgactccgcccgtttataaggaaatcggttatagtggattaacaaaaaccagtacggcgttgtctcgccttagctcaaagagaacgattctctaaggtgctgaagcaccaagtgaatcgattccgtactatccgtactgtctgcggcttcgtcgccttgtcctgatttttgttaatccactatatttccggttgcgtgggaatcgggtgtattgaataaaaggcattttgtccgactggcaagtgccgacatcggcggcatatcaaggcgcaggcttgaagcgggcaatgtcgtctgaagcccgtttggcgtttcagacggcattggtgcggatattcaaatcataaagtcgatttcggtaaactggatattttgatccatatccgccgacggtgttttgagcgatcgcgccacgggtttggcgggtacgccgacaaccgtgatggacggcggcacgtctgaaaccacgacgctgcccgccccgattttggcattgctgccgatgcggatattgcccaatatcgaggcgtttgcgccgatcatcacgccgtcgccgattttagggtggcggtcgccgccttctttgcccgaaccgccgagcgttacgccgtgcaaaatcgaaatattgttgcccaacacggcggtttcgccggcaacaaagccggtggcgtggtcgagcatcagcccgtatccgaaacgggcggcgggatggatgtccacgccgaatacttcggacatacggttttgcaggaaatacgccagcgttttgcgcccgtcgagatacagccgatggttgatgcggtgtgcctgaatcgcgtggaagcctttgaaatataaaagcggcagcgaatattcgtcgcaggcgggatcgcgttcgtagatggcttttaagtctgcttcgacgcatttgccgatttgggtgtcgctgcccaacgcctgctggtagatttcaaacagcgcgcgcacgtccataatcgggctgccgagtttgctggaaaggtggtaggcaaggacggagccgagggactcgtggcgcaacacggtttggtgcaaaaaacttgccagcatcggttcggcggagaccgcggccgcggtttcttcgcggatggtgtgccagaggtcgaaaccggttgtgtttaaatggtcttttttcatgagtgatgacgtttgaaaatcgatatggtcggcagtatcttaccgtctatattattttttcggtaggggatttgaaaatgaatttgaaattctctgcttttgcttgaagtttcttgaaaatgtccttatcttgcgcgggtaataactggattttgatttccaatttgttttaagggatacgatatgagcgaacagacacagcagcaaaacagtgaagaagcggttgaaaatgtggaggcggtggaaaccgtcgagacagtaggaaatgcggacggtgtgcaggaacaggctgccgcagagccggcttatgaggatttgcaggcgcggattgccgagctggaagcgcagttgaaagacgagcagctgcgcgctttggcaaacgagcaaaacctgcgccgccgccaccagcaggaaattgcggatacgcacaagttcgccggacagaagtttgccgtggaaatgctgccggtcaaggattatctggaaatggcgcttttggatcagagcggcaatttcgatgcgctgaaaatgggcgtgcagatgactttgaacgagttgcagaaagcatttgatgctacgcaaatcaaggaaatcaaccctaaagcgggcgataagctcgatccgaatatccatcaggcgatgcaggcggtggcaagcgaacaggagccgaataccgtggtgggtgtgatgaagaagggttatacgctgtccgaccgcgtgttgcgcccggctatggttacggtggcgcagaaggaagcctgaaggcgtctggggaataatctgatttatttcctgaagcgcgttttgcgtataaaccgatcgaagtaaagcggcaatgccgtctgaacccgcctgtcgggcttcagacggcattttatagtggattaacaaaaatcaggacaaggcgacgaagccgcagacagtacagatagtacggaaccgattcacttggtgcttcagtaccttagagaatcgttctctttgagctaaggcgaggcaacgctgtactggtttttgttaatccactatatttcggcgttaacggtcaacccgtatgccgcctgcctgtttttcttcatccagtttcttttgcagggtgtcgcaaggtgtgtcgcagtcgcacatttttttcatacccaaggcagtaatgccgccgcaactgcctttgatgctgcgtttggagaaaatatagccgaccgccataccgatgatgacggtcaggaagatgccgaaggtaaggagcagggttttcatggtgtttcctaatcggtttgtatgtttagcggagcagtttttcaaattcggaagacatggcggtgcggtagccgcctttatccctgacaatcaggaaaacagcgagtttttcgcgctctgccagctttaaggcttcggtttcgcccaatacgaataatcctgtggacaagccgtccgccgtcatcgcactgtctgcgaccacgctgatggaggcgaggttgtggctgatgggtcgtttgttgttcgggttgatgatatgggagaggcgtttgccgtttttatcgacgtggaaaatacggtaatcgccggaagtggcaagcgaacggttgttcagcgggacgataatctgcgtattgccgccttggacgatattgggctgctcgataccgatgcgccacggttcgccgcgcgcgtttttgcctttgccgtgcaactcgccgccgatttcgaccagataattttgaatgccgtatttttccagttcgcccgcaactttatcaacgccgaagcctttggcaatcgaagataaatccaaataggccttggggtgggttttgctcaaggaagcgtaatctttgccttgtttcaaaatgattttgtctatgcccgtataagatgccgcctgtttgatttgttccggcgacggttcacgggtaacggatttgtcggggccgaatccccaaaggttgaccaaggggccgacggttacgtccagcgcgccgtgtgtcaggcggttcaggcggacggcttcggcagtaacgtgtgcgaagtcgcttgaaatgcggaggggcttgccggctgtgtgttggttgaaccggctgatttcggagtcgggctgataggtggacatctgccggttgacttctttaagcgcgtcatcgatgcgtttttgtatttcggcaggtgaggggagtttgtcccgattatttgaaaggtatttgacggtataggtcgtgcccatcgtttcgccttgcagggtaacggtttgcgcggtttgttccgaacaggcgttcaggaagatgaaacccagggcaaatatcaagacgcggataaagttcggcaggcgtgtttcagacggcatagtgtttgacggttttggcaaatggtttgaattatatcgcaaaacggccggtatgtttctatgccgatgccgtctgaagggtgttcggatggcatcggcatagaaaaaggaagaaaccgaggtttcttccttttgtatttgaagccgaatatttaaccgccgaaatcgtccaagaggatgttttcgtcttccacgcccaagtctttgagcattttgatgacggactggttcataatcggagggccgcacatataaaattcgcagtcttccggtgcttcgtggtttttcaggtggttttcgtaaaccacgttgtgaatgaagcccgtgtagccgtcccagttgtcttccggcagcgggtcggacagggcgacgtgccacgtgaagttcgggaactctgccgcgagttggtcaaagtcttcgacatagaacatctcgcgtttggaacgtgcgccgtaccagaaggtaatcttacgtttggagttcaaacgtttcaactggtcgaaaatgtgggaacgcatcggagccatacccgcaccgccgccgataaataccatttcggcatcggtgtctttggcgaaaaattcgccgaacgggccggaaatcgtaactttgtcgccgggtttgagcgaccagatgtaggacgacatttgtcccggaggcgcatcaggtacgcgcgggggcggcgtggcgatacgcacgttcagcataatgatgcctttttcttcaggatacgaagccatagagtaggcacgcaaaatcggctcgtccactttggaaacgtattgccacaaattgtatttgtcccagtcttcgtgatattccttaggaatgtcgaagtctttgtaggcaacagtgtgaggaggagcttcaatttgaatgtagccgccggcgcggaaggggacttcttcgccttcgggaatggcaagcttgagttctttaatgaacgtggctttgttatcgttggagatgacggtgcattcccattttttcacgccgaacacttcttcggggacttcgatgtccatgtcggttttgacgttgacttggcacgacagacggcagccttcgcgtgcttcgcgtttgctgatgtgggacagctcggtcggcaggatgtcgccgccgccgctttttacgacgacgcggcattgtccgcacgaaccgcccccgccgcaggcggaggggataaagatgccttcgttggcaagcgcgcccaagagtttgccgccggcgggcatcgtcagctctttttcgccgttgactttgatggtgatgtcgccttcgctgaccagtttggatttggcaaacagaatcatcagtgccaaaaccaaaacgatgacggtaaacatcacgatacctaaaataatctccataccgatccctttcttataactggatgccagagaacgacataaacgccatcgccatcaggccggcggcgataaaggtaatgcccaagcctttgaggcctttgggagcgtccgaatatttcattttttcggtaatgcccgccaaagcgacaatcgccaacatccagcccaagcccgcgccgaagccgtatacaacggactcgccgaagttgtattcgcgttgcgccataaacgatacggcgccgaaaatcgcgcagttcacggtaatcagcggcaggtagatgcccaatgcgttatagagggcggggacgaatttatccaagaacatttccaaaatctgcaccaaagcggcaatcacgccgatgaaggtgatgaatttcaaaaaggtcaaatccacgccttcggcaatcgcgccgtctttgagcagcgagtaaacgagttggttgacagggacggacagcccgagtacgaaaattaccgccacacccaaaccgaatgcggtggatacttttttggataccgccaaaaacgtgcacatacccaaaaagaaggatagtgccatattttcaatgaagacggatttgatgaagaggctcaaatagtgttccatagcttattcctccgcctgttcgggtttccaggtacgcagtccccaaatcaaaaagccgatgatgaagaacgcgctgggggcgagcaggaacaagccgttggtctgataccagccgccgtcctgcacggtttggaaaacggtgtagcccaagagtttgcccgagccaatcagttcgcggacggtggcgacgacaagcagcattatcccgtagcccgcgccgttgccgatgccgtcgatcaggctttccagcggcggctctttcatcgcaaatgcttcggcgcggcccatcacgatacagttggtaataatcagaccgacgaatacggaaagctgtttggacaattcgtaggcaaatgcctgcaagagttggtcgaccagcgtaaccagcgacgcgataatcgccatttgcacgataatacggatgctgttggggatgtagttgcgtaccagcgaaatgaagaagctggaaaaaccggttaccaaagctacggaaatacccatcacgatggccgtctgaagtttggtggtaaccgccaaagccgaacaaatacccaaaacctgcaaggcaatcgggttgttgtcgataaagggtgaaaacatcaaatgtttcaagcgtttcatatcagccattattgcgctcctgctgatttcaatttgttcaggtaggggatatagccgttttcgccgaaccagtaggcgaacgaaccttgcacgcctttggatgtcagcgatgcgccggagagggcatctacgccgtgttctttgtccgaacccgcgcctttgccgacgtgcagggcgagtttgccttgtccgtcaaacagttttttgccgacgaatttttgctgccacaacggattgccgatttcgccgcccaagcccggggtttcgccttgttcgtagtaggtaatgccgttgatggtgttgccgtcgggctggatggcgacaaagccgtacatgaccgaccacaaaccgttaccgtgcataggcaggatgatttgcccgattttgccgtcttcgccttttaccaaataaacctcggtgtatttggcacggcttttgatgcctgccaaatcgtcttcggttttgatgcggatgctttgggcagggtctttgcctgcgatgcgcgcgctgaagtctttaggcgcatcggcgacgtattcgccggtcgccaaatcgacaacacgttgctcgatacgctcggcaaaggttttaccgatgtcggtgtccttatccatcaaaccggctacgctcaagatatagccttgtttgtcttggagtttttgtttctcttggatgggtttcaagccgacgaccgcaccggcaacgatgaccgagcaaatcaggctgaccgccaacacgacaatcagcgtgccgctgaagctgtctttatcgaatttcttagccattgctgcgcgcctttctgcgtttgatgttcgcttgtgcgacgaaatagtcgaaaatcggggcaaacaggttggcaaacagaatcgccaacatcatgccttcggggtaagccggattgaccacgcggattaatacgcacatcacaccgatcagtgcgccgtaccaccatttgccgacattggtaaaggaagcggaaacagggtcggtcgccataaacagcataccgatggcgaagccgccgaccaccaagtgccagtaccaaggcatagcaaacatagcgttggtgtccgaaccgatgaagttgaacagcgaagacatcgcaatcataccgatcatcacgccggcaataatgcgccaagaagcgatgcgggcaaacacgataaacgcgccgccgattaagagtgccaaagtggagacttcgccaatggagccgggcagtttgccgataaacgcgtccatccaagtgatggtttgaccggttacggcgtttttcaggccgtctgcaccgtgtgccgcccattgcgccagtgcggttgcgccggaatagccgtcaaccgccgtccaaaccgcatcgccgctcaagttggcagggtaggcgaagaacaggaaagcacggcctgccagcgcagggttcatgaagtttttacctgtaccgccgaatacttctttcgcaaccacaacgccgaaagaaatacccaaagccgcctgccacagcggcagcgtgggcggaacgattaaggcaaacagaatcgaagtaacgaagaaaccttcgttgatttcgtgtttgcgcacggtggcgaacaaaacttcccagaaaccgcccacaacaaatacagtcgcgtaaatcggcaggaagtaaatcgcgccaaacagcattttgtccgacacgcccgcttcagacgacatattgatgcccaaagcgttggcaaaggcgtaatgccagtcgttggcgatgttttgttgcagcaaatcaggcgttaacgcaccgaatgcctgcgcgccgacgttgtacataccgtagaacatggcagggaacaaagccagccacaccaaaatcatcatgcgcttggagtcgagcgcgtcgcggacgtgcgccgctttgcgcgttaccgcgccggatgtgtagaaaattgtcgccgcagcttcgtagagggcataccatttttcatgtttgccgcccggcaggaagtgcggttcgattttttccagaaaatgtttcaagcccataatcagccttccttctcaatggtttccagcactttgcgcaacagcgggccgtattcgtatttgcccgggcagacgaagctgcacaaagcgaggtcttcttcgtccaattccaagcaacccaatgcctgcgcgctgtcggtatcgccgacgattaaatcgcgcaaaagcagggtgggcaggatatccaagggcatcacgcgctcgtaagtaccaatcggcaccatggcgcggtcgccgccgttgacggctgtgttgaacttgaagagtttgtttttcaggaaatggccgagggttgtacgcgtgatggagtatttgtccggctgcggcgcaacccagccgaacagctctttgctgcggccttcttcgataacggaaatctgattgtggtagcgtcccaaataatcgtgcgcgccttgtgtaatcgcgccgttcaataccgaaccggaaatcacgcggttgtctgtgtcaaccaattcgcccgcagtaatttgcgatactttcgcacccaaaacggtacgcaagaggcgcggtttgttgacttgagaaccacctagggcaatcacgcgctcggtgttcagacggcctgttgcaaacaaacggccaatggtaattacatcttgataattgatggtccacacggttttattcgcgccgaccggctcgatgaaatgaatgtgcgtgccactcaaaccggcaggatgcgggccgccgaattcatgtgtttcgatgttggcagcattttcagacggcacgtctgcgccagctgccttacaaacatggattttgcgttcggtcaaacggctcaataccaacaggccgcgtttgaaatcctcggcggcttctttgataatgaccgtagggtcggcagccagcggattggtgtccatcgcattgacgaagatggcgaacggctcggcatcgacggcaggaattttgctgaacggacgggtgcgcagcgcagtccacaaaccggattggatcaggttgcggcgcacttcttcgccgcttaagtttgccagcgcttcaggtgcgtagcgttcaaactcgatttcgtcgttgccttcaacggcaatcacgactgactgaagtacgcgcttttcgccacggtgaatcgcggcgattttgcctgaagccggcgcagtaaacaccacgcccggattctttttgtcttcaaacagcacttggccttttttgacggcatcgccttccttgactttcatcgaggggcgcataccggcatattcttcgccaagcaacgcgacttcggtaatggccgggccgtcgtaaacggcttgctccggtctgcccgcgatgggcaggtttagaccttttttgattttaatcatatatttgcattacttgtgatggttaaggtaaaaacggcgtgttttgataccgtgtcgcgtggcatcaaaagcattgaataaattaatgtagcaaagtgttagattctatcaggaattgtacctgtttgtcagatttgctgcttttttccttgcggaagccgtttttatagtggattaaatttaaaccagtacggcgttgcctcgcccttgccgtactatttgtactgtctgcggcttcgtcgccttgtcctgatttttgttaatccactataaattgtcggaaggggggatattgatttgattatgccggaatttaaaatgccgtctgaatgttcagacggcatagcgtttacagcagtttgaaaacgaaaaagataagggtatgtacgatgaagacgggtgtcaggaaggcgaccgaccacatcatatagccgaagaaagtcggcatcggtacgccgcgctgttcggcaatggccttgaccatgaagttcggtgcgttgccgatgtaggtcagtgcgcccatgaataccgaacccatagaaaccgccagcagcgaatgaaacagggtacccgtcatcaaggcttgggcatcgccgcccgccatattgaaaaaaacgagataagtgggcgcgttatccaagaatgccgacaatatgccgctcatccaaaaatacatcacattaatcggatgacctgccgtatcgtgaaccagcgataccaccccgcccagcgcgcctgcctcgcctgctttcagaatgctcaggacgggaaagatggtgatgaagatgccgaggaagagtttgcccacttcggcgatgggttcaaagttgaattcgttgcctgcgcggacttgtttgggcgtgattgccatagatacggcggtcaatgcaatcaggatgacatcgcggacgaggttttgcagggcgtaacggctgccgaggatttcaaatcccgggtgttcgggtttccaaaggccggacattagaaccgcgccgaccacgcccgaaagcaggaggaagttccatttgccgaagatggcgattttttcgggtttttcctgttgtgccggcgtatcttgtgcaatgctttcctgtttgaagaaacggttgtcgatgaaatagaaggcggtcaacaggacagcggtgctgatcaggacgggggcgaacatatgtttgaccgtccacatgaaatctacgcctttgaggaagccgaggaagagtggggggtcgcccaaaggggtcagaccgccgccgatgtttgcaaccaggaaaatgaagaagatgacgatgtgcacgcggcgggtacggttttggttggctttcagcagcggacgaatcatcagcattgctgcgccggtcgttcccatgatagaggcaagtgccgtaccgacggcaagcagggcggtgttgagcttgggtgtgccgttcaagtcgccccaaaccaaaatgccgcctgaaatggtgtacagggcaagcagcagcaggatgaaagggatgtattcttcaacgagtgcgtgtgcgacggtatggataccggcggacgcgccaaaaaccaaactgaacgggatgaggaagagcaatgtccaaaaggcggtaattttgccgtaatggtgatgccaggtatgcgaaaaaaacaagggacccaatgcgatagacagcaaaatcagggcaaagggcaggccccacagcaggtttaggtttgcgccgtccaaatctgcggcgtaaaccgatgctgggaaaagcattagtgaaaacaggggtaggtggcgcatcgtgtttcctcgattcaagcactgccttgcgcggcgcgtgggagtgatacaggcaccgtgccgcccggacataggcggactgtgctgcctgtttgtttttgaaaaaagttttccgattgattgtaaagtaaataatcaggataaaccagtttcccaaaccggaaggcggcgggaaggcggattgctgtgcttgggaatatatgttctttttgataaataattttatttaaaacaaataaatatatgtctttaataaataatctatcgaaaacgaaaaatgaatttattttaacatatatttgcaatgaaacaggtttgcccccccccgtttgtttgcccttatccctttcagtacggcattcaagattcgggcctgcgccacatccatatggcgacaagggaacaaaaaaccgatgaaaccgccccgacccaccagcgttggggaaactgccaaaacattatcaggcaggatgcggtcatcatactgatggcgaatattttggctttgcgcggcactgcgccgttttgttcccagttatgaaccatcgggccgaaatagcggtgccggtgcagccagcggtaaaagcgcggggatgcctttgcccagcaggcggcggagagcagtacgaacggcgtggtcggcaacagcggcaaaaaaatgccgatgatacccaacagtagggaaatgcagccgcaggcaattaaaagataacgtatcattttgaaatatttttcttattgtgcggataagggcaggatgtgataccgagttttgcccagccttcatgtcccattttttccagcagggcgatattgcgttcgaatattgccgaagcgtcgggaaaggcttgtgcggctttggcaatgctgtcttcgcggatgaggtgcagcgtcggatagggagaacggttggtgtagttgccaatgtcgtctgaatccgtgccttcaaattggaaatcgggatgaaacggggcgatttggacgatgccttctaagccgttttcgacaacggcggcatcggcaatgtcgagcatatcgttgaatacgtcgaaatcggggaatagggtcgggtgaaccagcagggtggtttccagttcggtggcgggtgtattgcccagtcgctgcagttcttcgtccaagtcttccaaaaaaccgtcaaggtgtttggcttcgctgatcgcgatgcggacaaggtttttaacgtggggggctttggcaaagggacacaggttcagaccgatgacggctttttccaaccattgtccggtgtgttcggcaacagcatctttattttcggaagtattgatattcattattgtcatgtaaatgtgtttgcagattgcacgtgcgggaaaatcgggaagggcactattccttcagcaggtggttgagcggcagggaggtggtgtgtttgatttcttttaaaacaaagctcgattgcgcatcttgtacgccgtggtgggacaggagcgtatccaaaacaaaatgggaaaacgcgttcatatcggtaaaaaacgcctgaagcaggtagtcggtttcccctgtcagggcgaagcagctcaagacttcaggccattttcgaaccgatgcggcaaagtcttcccgcgcgtcttttgctttgcggatggaaacgcggataaatgcctgaagtcccaagttgacagattccggagacagcagcgcggcatattggcggacgataccggcatcttccaactgcttcagacggcgcaggcacggagaaggcgaaagtgcgacacgttcggacagttcgacattggtcagcctgccgttttcctggagaacctgtaagattttaatatcggttttgtctaaagtgagttggggcatatttgcgttccgttttaaggaattcggattgtctgtccgtatgtttgcggcaatccgcacagatggagaccatattaacatataaaaagttataccgtcatccgggacaaattttgttttcggaaaatcatgtgaaaacagaggcggtcggtttgcatctctttaagacggcttgcccaaaccgccgattcaagacataatcgggaaatgtgcaggagagtgttacacccaactacaatgtaaccaccgaaggcgcagacacccttaaatcgctcaggtatcagggactgcacattgaaacaaacaatctggagagcggcgttggaataacgtccaccgaaggggagaaggccgtctgaaccaccattcagacaaccgcgcaaagcagtgagcagactggtttgccatcatgcggatacagccgaaaatctcaggttcaaggacagatagggtcatccgcgcacaggtgcgcgggcggcatctgaacaaaaaatccggagaaacttgagaatgactgctctgaaaaccaccccatttcatcaagcccatcaagatgcaggcgcgaagctggtcgattttgccggctgggagctgcccatccattatggttcacaaatcgccgaacacgaagccgtgcgcaccgacgccggtatgtttgacgtatcccatatgctcgttaccgacgtagcaggcgcaaatgccaaagcctttttccgcaaattgattgccaacgatgtcgccaagctcgcttttgtcggcaaagccctttattccgctttgctcaacgacaacggcggtgtgattgacgacttaatcgtttaccgcaccaatgaagccgaaacccaataccgcatcgtgtccaacggcgcgacccgcgaaaaagacacggcgcaattccacaaagtcggacaagagttcggcgtcgccttcaatccgcgctacgacctcggcatgctcgccgtacaaggccctaaagccattgaaaaactcctgaccgtcaaacccgaatgggcagatgtcgtccataacctcaaaccgttccaaggcgcggatttgggcaacgactggtttgtcgcccgcaccggctacaccggcgaagacggcgtcgaagtcatcctgcccggcaccgaagccgtcgcattcttcaaagccctgcaacaagccggcgtacagccctgcggcctcggcgcgcgcgacaccctgcgcatggaagccggcatgaacctctacggcaacgatatggacgacgacaccagcccgctcgaagcaggtatgggttggaccgttgacttgaaagacgaaagccgcgacttcgtcggcaaagccgccttgctggcattgaaagaaaaaggcgttgccgtcaaacaggtcggcctgttgctcgaaaaaggcggcatcctgcgcgcgcatatggaagtgttgaccgacaaaggccaaggcgaaaccaccagcggcgtattctccccaagcctgaaacaatccatcgccatcgcgcgcgtaccgaaagattttgacggcgataccgccaaagtgctgatgcgtggcaaagaagtggacgtgcgtgtactgaagctgccgtttgtccgcaacggacagaaacagtttgattgatgcggtttcagacggcattttcatttcatatgccgtctgaaagcaggttttaattgttgtccgatacggacgtttgtagaaagcattgaacaaggcatctgtggatattgattcatgcagatgccgtctgaaaataacccctatcaatggagtatcaaaccatgagcaacaacatcccggccgaactgaaatacgttgccagccatgaatggctgcgccttgaagaagacggtacgattaccgtcggcattacccaccacgcgcaagagctgttgggcgacatcgtgttcgtcgagctgcccgaagtcggcgcgaaccttgccgctgaagagcaagccggtgtggttgagtctgtaaaagccgcgtccgacgtgtacgcaccgattgcaggcgaagtcgttgccgtcaacgaagatttgccaagcgctccggaaactgccaacagcgatccttacggtgcaggctggttcttcaaactcaaaccggcaaacgttgccgattacgacagtctgctgactgccgaacaatacgcgggcgaagtggattaaaccgcccggctgcccgacggcaaccgccggacaaacggaaactgcaccttcagacggcatttttgcggtcggaggtgcagttttttgtccgtgttttaaggaagcagttaggctataataacggtctatattcatctttaccgattttttcatgcaacttaccgctgtcggactcaatcatcaaaccgcacctttaagcatacgggaaaagctggcgtttgccgccgccgccctgcctaaagccgtccgcaatcttgcccgaagcaatgcggcaacggaggcggtaatcctttctacctgcaaccgcaccgagctttactgcgtcggtgattcggaagaaatcatccgatggcttgccgattaccacagtttgccgattgaagaaatccgtccgtatctgtacgcgctggatatgcaggagactgtgcgccatgctttccgcgtcgcctgcgggctggattcgatggtgttgggcgagccgcagattttaggacagattaaggatgccgttagggttgctcaagagcaggaaagtatgggtaagaaactcaatgccctgttccaaaaaaccttttccgttgctaaagaggtccgtaccgatactgccgtcggcgaaaactcggtttccatggcttccgcttccgtcaaattggcggaacagatttttcccgacatcggcgatttgaatgtcttgtttatcggcgcaggcgaaatgattgagctggttgccacttattttgccgccaaaagtccccggctgatgacggttgccaaccggacgctggcgcgtgcacaggagttgtgcgacaagctcggtgtcaacgccgaaccgtgcctgctgtccgatctgcctgccattctgcacgattacgacgtagtggtttcttcaacggcaagccagttgcccattgtcggcaaaggcatggtggagcgtgcattgaaacaaaggcagagtatgccgttgttcatgcttgatttggcagtgccgcgtgacattgaagcggaagtcggcgatttgaatgatgcctatctttatacggtggacgatatggtcaatatcgtccaaagcggcaaggaggcaaggcagaaggccgccgccgccgccgaaacgctggtgtccgagaaagttgccgaatttgtcaggcagcagcagggcaggcagagtgtccccttgattaaggcgttgcgggacgagggcgagaaagcgcgcaaacaggtgttggaaaatgccatgaaacagcttgccaaaggcgcaacggcagaagaggttttggaacggctgtccgtccaactgaccaacaagctgctgcattcgccgacccaaaccttgaataaggcgggggaagaagataaagatttggttcatgccgtcgcgcagatttatcatttggacaaataacggtgcgccgggaaaaatgccgtctgaagaggtttcagacggcatttttttgtgccgcctgacaacatcgtgaaatcccacattatatcgatgtaatcacaaagtatagtggattaacaaaaatcaggacaaggcgacgaagccgcagacagtacagatagtacggcaaggcgaggcaacgctgtactggtttaaatttaatccactatattatcccgtatgcggattggttttaagatttgtaaatttgatttgcatcaaaaaatcgccgatagatgattcatataatatcaatattaaagagtatcggtatatcggggatagtcatgtcctgtttttcaatcaaacgtatgtccgcgtttcgggcgcggataacggcgttttttgccgcctttgtctttttgacggcggcactgcccgcttatgcggagcgtctgcctgattttctggcgaaaatacagccttcggaaatttttccgggtgcggaccgttacggcaagccggaaggtaagcctatggttgcccgcgtttacaaaggcgatgagcagttgggcttggtctatatcacgaccgatgcggtcaatacgcgcggttattcgagcaaaccgattgatacgctgatggtgttggcaaacgacggcacgatagccggggcgaaactggtcgaccatcacgaaccgattatgctgatcggtatcccgcatttgcccgcgcccgggcgggcgatacgctcaaactggcttccggcgtatataaaaccaaacttcacattgacaaaccgattacgattgaagggcctgccgaccgttccgcaaccatcgaaggcgacaggagcgggcgtaccatagccgtacacgcgccggacgtaacgctccgcaacctgaccgttacccgttccggtatgagcctgcccgcaatggatgccggtatttatctcgaagaaactgccccgcgcgccctgattgaacacaacaatattttggataattcggtcggcgtatatctgcatggttctgccgatgcgatggtgcgcgagaataaaatcgtcggcgacgcgactttgcgcgtgaacgagcgcggcaacggcgttaccgtttggaacgcacccggtgcgcaggtcgtcggcaacgacatttccaaagggcgggacggcattttttccaataccagcacgcacaacacctacaaaaacaaccgcttcagcgatttgcgtttcgccgtccactatatgtacaccaacgacagcgaaatcagcggcaatatttccgtgggcaacaatatgggctatgtgctgatgttttccgagcggctcaaagtattcgacaatatcgccgtcggcagccgcgatcagggcattatgctcaactatgtcaactattccgatattcacgacaacattatcaacaaggcaggcaagtgcgtatttgcctataatgccaactacgataaacttttcgccaatcattttgaaaactgtcaaatcggcatacactttaccgccgccatcgaaggcacgtccttgcatgacaattcctttatcaacaacgaaagccaggtcaaatacgtcagcacgcgctttctcgattggagcgagggcggacacggcaactattggagcgacaacagcgcgttcgatttgaacggcgacggcttcggagacagcgcgtaccgccccaacggcatcatcgaccaaatcatctggcgcgcgcccgtatcgcgccttttgatgaacagtcccgcaatcagcatcgtcaaatgggcgcaggcgcagtttcccgccgttctgcctggcggcgtggtggacagcaaaccgctgatgaagccttatgcccccaaaattcaaacccgttatcaggcgatgaaggacgagctactcaaagaagtcgaaacgcggcagtcggaatggggcagggcggaaaacggttctttgaactagtctgcttcagacggcatccggattcaaatgccgtctgaaaacacaaaaggaacaaccatgaccacacatcatgtcgaattgaggaaggtaaccaaacggttcggggcgcaaaaagccgtcaaccaagtcgatttggttttgaaggcaggagaaagcgtcgggcttgccggacacaacggcgcgggcaagtccaccattatgaagctgatactcgggctgattaccccgaccgaaggcgaagtgatgcttttgggcgaacgtaccggtagcaaagcgggggcgcggcttcgcagccaaatcggctacctgcccgaaaccgttgcgctgcacccttcgctgatcggcatcgaaacgctggatttttatgccaaacttaaaaaacagccgctcacgcagaaccgggggctgcttgagcgcgtcggcatttcacaggcggcacaccgccgcgtcggcacttattctaaagggatgcgccaacgccttgccttggcacaagccctgctgggcgagcccaaagtcctgctgtttgacgaaccgacaaccggtcttgaccctgcatcacgacaaatgttttacgaagtcgtgcgcgaactcaacgggcgcggcgcgaccgtattgctcagcacccacgcccttgccgagttggacgggcacgccgaccgcattatcgtggattaaatttaatccactatatgcgggtatggcgggtttgagcggacaaatcagcctgaccgtccccgttttgctgaccgctcaggttttatgggttatcattccgcttgttttggcagccggaatttttagaaagcgacaaatatgaaaaaaaccctgttggcaattgttgccgtttccgccttaagtgcctgccggcaggcggaagagggaccgccgcctttaccccggcagattagcgaccgttcggtcggacactattgcagtatgaacctgaccgaacacaacggccccaaagcccagattttcttgaacggcaaacccgatcagcccgtttggttctccaccatcaagcagatgttcggctataccaagctgcccgaagagcctaaaggcatccgcgtgatttacgttaccgatatgggcaatgttaccgattggacgaatcccaatgccgacacggagtggatggatgcgaaaaaagccttttacgtcatcgacagcggctttatcggcggtatgggtgcggaagacgcgctgccgttcggcaacaaagagcaggctgagaaatttgcaaaggataaaggcggtaaggttgtcggtttcgacgatatgcctgatacctatattttcaaataatattgaaaaaaccggccgaaactttaaaaacgagtttcggtcggtttttcttttcttgttcggtatagtgtcggcaggaaagaaccttcacatcccgccgtaattcggcccgctcgcgccttcggggcaaatccaagtgatgttttgcgtcgggtctttgatgtcgcaggttttgcagtgcacgcagtttgccgcgttgatttgcaggcgcggattgccgttttcttcaacaatttcgtacacgccggccggacaatagcgcgtttcgggcgaggcgtattctttgtagttcacgtctatcatcgtttgcggattgttcagcaccaaatggtcgggctggttttcttcgtgcgcgagattggcaaggaagacgctgctcaagcggtcgaaggtcaacacgccgtcgggtttcggataatcaatcggcttacacgcggcggcttttttaagctgctcgttgtctttgccgtgatgtttcaaggtccacggggctttgcctctgaaaatcatctgatcgatgccggtgtagattgagccgaggtaaacgccccatttgaatgacggacggacattgcgcgcggcgtaaagctcttgatacagccagctttgttcaaaacgttgctgataatccgccgcctctttgccgctgtcgaaaccctccacttcttcaaggttttccaacaaggggaacacggcttcggcggcgagcatggcggatttcatcgcggtatgaatgcctttgatgcgcggcatattgaggaaacccgccgcatcgccgaccaaaatgccgcctttgaacgagagcttcggcaaactttgcaaaccgccttcaatcagcgaacgcgcgccgtaagcaatgcggcggccgccttcaaaggttttgcggatttcgggatgggttttgaaacgttggaactcttcaaacggcgacagataaggattttgatagtccaaaccgaccacgaagccgacggcgactttgttgtcgtcgaaatggtaaacaaacgcgccgccgtaggttttgctgtccagcggccagcctgcgctgtgcaccaccaaaccgggctgatgctgttcggacggcacttcccaaacttctttaatgcccaagccgtaagtttgcggctggctgttttggtcgagttggaaacgttcgatgatttgtttggaaagcgaaccgcgacaaccttcggcaaacagggtttgctgcgcccaaagctccatgccgggttggaatgaatcggtcggctcgccgtctttgccaatgcccatattgccggttgcaatgcctttgaccgaaccgtcttcgtgatacagcacttcggcggcggcaaagcccggatagatttccacgcccatattttccgcctgctccgccaaccagcgcacgacttcgcccaagctgacgatgtagttgccgtgattgtcgaaattcggggtaatcggcaggttgaacgcttttttctcggtcaggaacaacactttgtcctgcgttactgtgcgtgtcagcggtgcgcctttttctttccagtcggaaatcaactcattcagcgcaatcggatcgataactgcgccagccagcgaatgcgcccccacctccgaacctttctccaccacgcaaacgctgatttcgcgcccgttttgttcggcaagctgcttgagtttgatggcggcagacaaacccgacgggcctgcgccgacaatcacgacatcgtattgcatactgtcgcgggtgatggattctgtcatggcggttcctgtgtatttattattgaattgcaaatccgtaattatacaacgggaacatatagttaccaaatacaacaaaggtcgtctgaaaaccatattttcggttttcagacgacctttgtcgaaatttcaataagcacgccaccattttacctgtccgaccgcaaactccgtctgacgtttcggactgcgtgtgaaaaacgccttatccccgccggcatccctccctttcggcacaaccgccaaaatcttacctgccaaatttccctcacgggtttgccaagcatccaaaaactgcgccctgctcattgaaacatgacccagcgacgggtcggcaagcaaaaccgtattgccgtctataccgcgcaataccgagaaatgatcatccttgcggtatttcagatacacgatgacggggatttgcaactgtgcaagctgctcgaaagacagggcatagcctttcgcttcaaaacccaaatcaggcataatgcgccgcatatcctcaaacgacgcgggcatctgctccttatccagtttttttaacacgtcctcttccgtcagcttttgcccgtaaaaattgttcaaaagcgtcaccaccgaagccgccccgcaggaaaaatccaaatcctgctttacaatattgaaatcgcgcctttctttccaactctgcactttgatttttccataagcaacaggattatagtggattaaatttaaaccagtacggcgttgcctcgccttgccgtactatctgtactgtctgcggcttcgtcgccttgtcctgatttttgttaatccactataggtttccgtgcggacgtgttcagattcccgccttcgctggaatgacggcggagcgatttctacttttccgataaatgaccgtaacttaaaatcccgtcatccccacgaaagcaaaaatcccgcctgtcggatttcggtttttttgggcgtttcgggaaacttataaatcgtcattcccgcgcaggcgggaatccggtttgctcggtttcggtttttcgggcgtttcgggaaactgatgaatcgtcattcccgcgcaggcgggaatctagaacgcgggacggcggcaatattcaaaggttgtctgaaaattcagaggttctagattcccactttcgtggggatgacgggatataggtttccctacggacgtgttcagattcccgctttcgcgggaatgacggcggagcgatttctacttttccgataaatgaccgtaacttaaaatcccgtcatccccacgaaagcaaaaatcctgcctgtcggatttcggtttttttcgggcgtttcgggaaactgatgaatcgtcattcccgcgcaggcgggaatctagaacgcgggacggcggcaatattcaaaggttgtctgaaaattcagaggttctagattcccactttcgtgggaatgacgggatataggtttccctacggacgtgttcagattcccgctttcgcgggaatgacggcggagcgatttctgcttttccgataaatgaccgcaacctaaaccccatccttcccgcaaaaacagaaaaacaaaaacctaaaatcccgtcatccccacgataacagttgcgtaattgcgtagagtgggcttcagcccaccgttttttctttttcggtcgttgattggtgggctgaagcccacccttgtatatcggaactcccgtatcatagcaacaaaccgcccggccgccacccgcgcccacccaaggcacacaaccgttgcgtagcacagggagcggcagggcaacccatcgacacaaccggacagttgccggacaacacaaccgaatgtaaggcaggttgatgatgagtacccgataccattacgcaggtatagtgaattaaatctaaggggctgtactagattagccctaaattccacaccaatcccgcaggattttaagctgttgagacggtgtgccgaagttaaatcgaaattcgcattctttcaagaacagcgggaaagatttacgatcgattccgttgtattttcgcaagacgcgttttgcctgattccaaaagttctcaatgccgttaatgtggttctgacggtctgcacactccttggaatggttgatgcggtaatggataaaaccgctcacgtccaacttgtcgtagctgctcagactatcggtataaacaatactatccggcatgattttctttttgatgacagggagtaacgtttcagacttggcattatccaccacaacggtatagacccgtccgttgcgtttcagaatgccgaaaacaaccacttttcctgccgcaccgcgaccacgtctgcctttacgccgtccgccgaaatcgctttcgtccggctcgacagggccctcaaaaacctcatcggcagccaaggccaaatgatggttgataaccgtgcggattttacggtagaacagtgctgccgaattgggatggatacccaaaatatcggcggcagaacgggcggtaacttccagtacaaaaaacggagcagttctttctgtacttttttctttaatttgcagtgcgttatcttcatatttcgagggtaacatatctgctaatctagtacagccccaaaaatataccaaaaacagcaaaacaaattgtaaggatacgtataggctttgtaaaggtaaattgtgaaaaaagcagttttttaaacgaatgaaacggcttcgggctgaaatatatgctgatgccctgttcttcccgtatttctcgtgtgttgtcaaagtgcaggctgctttgaaatcggtattgccatctatgaaccaccactttgctttatttcagcgggcttgagatgtgtataagaatattgttttgaataaatttaaagaaaatgataatcgttattgacgatttttaaaggaaagcgtagagtgccaattctatgaagcaatacggtaagtaacaatgaaaatatctactgcttgggtatagagcatatttcacaacccgtaactattcttgcggaaacagagaaaaaagtttctcttctatcttggataaatatatttaccctcagtttagttaagtattggaatttatacctaagtagtaaaagttagtaaattatttttaactaaagagttagtatctaccataatatattctttaactaatttctaggcttgaaattatgagaccatatgctactactatttatcaactttttattttgtttattgggagtgtttttactatgacctcatgtgaacctgtgaatgaaaagacagatcaaaaagcagtaagtgcgcaacaggctaaagaacaaaccagtttcaacaatcccgagccaatgacaggatttgaacatacggttacatttgattttcagggcaccaaaatggttatcccctatggctatcttgcacggtatacgcaagacaatgccacaaaatggctttccgacacgccagggcaggatgcttactccattaatttgatagagattagcgtctattacaaaaaaaccgaccaaggctgggttcttgagccatacaaccagcaaaacaaagcgcactttatccaatttctacgcgacggtttggatagcgtggacgatattgttatccgaaaagatgcgtgtagtttaagcacgactatgggagaaagattgcttacttacggggttaaaaaaatgccatctgcctatcctgaatacgaggcttatgaagataaaagacatattcctgaaaatccatattttcatgaattttactatattaaaaaaggagaaaatccggcgattattactcattggaataatcgagtaaaccaggctgaagaagataattatagcactagcgtaggttcctgtattaacggtttcacggtacagtattacccgtttattcgggaaaagcagcagctcacacagcaggagttggtaggttatcaccaacaagtagagcaattggtacagagttttgtaaacaattcaagtaaaaaataatttaaaggatcttattatgaatgagggtgaagttgttttaacaccagaacaaatccaaaccttgcgtggttatgcttcccgtggcgatacctatggcggttggcgttatttggctaatttgggtgaccgttatgcggatgatgctgctgcaattgtcggtaaggatgcaaacttaaatggtttgaatttatggatgaaaaaaggtgtggaaaacctatgggatgatacggtcggtaaaaagacccgtttagagaaatttgatcgggttgcattgcaacatttcagccaatatgtagatctaattaatgaaaataatggtagattacctaacactagtgaaattgagagaagttactataaagccgttaccgaaaatggtgtttcttctagtgcagctattgatttagttattaatcgctcacttccggatatggcagatggttattgggcattaggtttggggatagaagccgaacgtatccacaatgagcaagcagtaaataatccgaacggtagcgaaagggataatagaaagcagttaatatctgctttagataaaggatttgatggatcttttaaagagaagcattttacttttttacaatctgtgataatggatgtaacaaagttaggtgttgaatatacaatagatggttggcaaaaaattggaggttggggtaatgggataatcaatgatttatataaaagtgttgtaaaaagagagtggactggaatatttgagatcgttaataataacatcaagcaatttagagatctgttcccaaatccggaaggctggatcgatgatggtcaccaatgtttcgctccttgggttaaagaaactaaaaaacgcaatggcaaatatcatgtctacgacccccttgccctagatttggacggagacggcatagaaactgtcgctgccaaaggcttttcaggcagcttatttgatcacaccaacaacggtatccgcaccgccaccggttgggtttctgccgatgacggtctgcttgtgcgcgatttgaacggcaacggcatcatcgacaacggtgcggaactcttcggcgacaataccaaactggcagacggttcttttgccaaacacggctacgcggctttggccgaattggattcaaacggcgacaacatcatcaacgcggcagacgccgcattccaatccctgcgtgtatggcaggatctcaaccaggacggcatttcccaagctaatgaattgcgtacccttgaagaattgggtatccaatctttggatctcgcctataaagatgtaaataaaaatctcggtaacggtaacactttggctcagcaaggcagctataccaaaacagacggtacaaccgcaaaaatgggggatttacttttagcagccgacaatctgcacagccgcttcaaagacaaagtggaactcactgccgaacaggcaaaagccgccaatcttgcgggcattggccgtctgcgcgatttgcgcgaagctgccgcattgtccggcgatttggccaatatgctgaaagcttattctgccgccgaaactaaagaagcacagttggcattgttagataatttgattcacaaatgggcggaaaccgattcgaactggggcaaaaaatcgccaatgcgactttcaaccgattggacgcaaacggctaatgaaggtattgcactgacaccatcccaagtagcacaactaaaaaagaacgctttagtttccctttctgataaagctaaagcagctattgacgccgcccgcgaccgcattgccgtgcttgatgcctacacggggcaggattccaacacactctattacatgagcgaggaagatgcgcttaatatcgtcaaagtaaccaacgatacatacgaccatctcgccaaaaacatctaccaaaacctgttgttccaaacccgtttgcagccatatttgaatcaaatcagtttcaaaatggaaaatgatacgttcactttggattttagtggtcttgttcaagcatttaaccatgtcaaagaaactaatccgcaaaaagcttttgtggatttggccgagatgcttgcatatggcgaacttcgttcttggtatgaaggccgaagactaatgaccgattatgtggaggaggcaaaaaaagcaggtaaatttgaagattaccagaaagtgttgggtcaggagaccgttgcattattagctaaaacatcgggtacgcaagcagatgatatcctgcaaaatgtaggctttggtcataataaaaatgtttctttatatggtaatgacggcaacgacactctaatcggcggcgccggtaatgactatttggagggcggcagcggttcggatacttatgtcttcggcgaaggcttcggtcaggatacggtctataattacgactacgctaccggacgcaaagacatcatccgctttaccgacggtattacagccgatatgctgacttttacccgagagggcaaccatcttcttatcaaggcaaaagacggcagtggacaagtgactgttcagtcctatttccagaacgatggctcaggtgcttaccgtatcgatgagattcatttcgataacggcaaagtactggatgttgccactgtcaaagaactggtacagcaatccaccgacggttcggacagattgtatgcctaccaatccggaaataccttaaatggcggattgggcgatgactatctgtacggtgccgacggggatgacctgctgaatggtgatgcaggcaacgacagtatctacagtggcaatggcaatgatacgctcgatggaggagaaggcaacgacgccctgtacggctataatggtaacgatgcactgaatggtggcgaaggcaatgatcatttgaacggcgaagacggtaacgacactctaatcggcggtgcaggcaatgattacttggagggcggcagcggttcggatacttatgtcttcggcaaaggcttcggtcaggatgcggtctataattacgactacgctaccggacgcaaagacatcatccgctttaccgacggtattacagccgatatgctgacttttacccgagagggcaaccatcttcttatcaaggcaaaagacggcagtggacaagtgactgttcagtcctatttccagaacgatggctcaggtgcttaccgtatcgatgagattcatttcgataacggcaaagtactggatgttgccactgtcaaagaactggtacagcaatccaccgacggttcggacagattgtatgcctaccaatccggaaataccttaaatggcggattgggcgatgactatctgtacggtgccgacggggatgacctgctgaatggtgatgcaggcaacgacagtatctacagtggcaatggcaatgatacgctcgatggaggagaaggcaacgacgccctgtacggctataatggtaacgatgcactgaatggtggcgaaggcaatgatcatttgaacggcgaagacggtaacgacactctgatcggcggtgcaggcaatgattacttggagggcggcagcggttcggatacttatgtcttcggcgaaggcttcggtcaggatacggtctataattaccatgtggataaaaactctgacactatgcactttaaaggatttaaagcagcagatgttcattttatccgttccggaagtgatttggtgcttagcgcttctgaacaagacaacgtacgtatttccggatttttctatggtgaaaaccatcgtgtagatacatttgtctttgatgatgcagctatcagtaatccagattttgccaagtatattaatgctggcaataatttggtacagtctatgtctgtgttcggttctaatactgctgcgacaggaggaaatgtggatgccaatatacaatccgtacagcagccgttattggtaacgccatctgcataaggagcctaattacattcatggcttaaactgaaaaacagcaatcaagtttattttgattgctgtttttcttaatattgggataagggtcgtattttaattaaccttaatcggtgcacttctagcaatatagtggattcacaaaaaccagtacagcgttgcctcgccttaccgtactatctgtactgtctgcggcttcgtcgccttgtcctgatttttgttaatccactataattttcagacggccttttgccttttcaaattcaaaccaatcaaacggttttattgcttcatcgcgttggtcaaggctttgatgttgtggcggtacattccgatgtaggtgtctgcgggcgcgttgccgagtgcgtcggaatacagtttgccgctgacgttgacaccggtttctttggcgatacggtcaaccatacgggtgtccttgatgttttcggtaaagacggctttgatgccttcgcgtttgatttgtcggatgatggcggcgacttgtttggccgaaggctcggcttcgctgctcacgccttgcggggcgatgaattcgatatggtaacgtttgcccatataggaaaaggcatcgtgcccggtcaggactttgcgtttggcagcagggacggcattaaatgcggcttgtgcgtcgctgtgcagttttttgagctgcatttggtagttgcccaagcgttgttgataataaactttgccttcgggatcggcctttatcagggctttggcaacgttttgggcataggcggacataaggacggggtcgttccagacgtgcgggtcatattcgccgtggtcatggtggtgtccttcgtggtcatgatcgtggtcgtgatggtgtccgccttcttcttcggctttgaggggttggatgcctttggtcgcttcggtataggatactttgctttgtttgacggcgcgttgcacatcggcagcttcaagtcctaagccgttgagcaggacgagttttgcactgcggatttttttaatgtcgccactggtcatatgataggcgtgcgtatcttggttggctccgaccaaactttgtatggatacgcgctctccgccgatttgtttggctacgtcgcctaaaatgctgaagctggttacaaccggcaggggggcggcagttgcggaggcggtcagcaatgcggcaataagggtgagtttgaggtgtttcataactgttctcctgtgatataacgtaacatctgttatggtaaaacaagccgcctgtttgttcaagcggcttgcggggtcaggtggtgtggtggcggtggtttttgagccatttggtcagaatgccgccttctttgccgagtatgacggaaaagagataaaggacgctgcaacagaggatgatggcgggaccggaaggaatttcgatgtggtaggaaatgagcagtccgctcaagccgcacagcagggctgtcagaacggataggaggatgagtgcgcccatatgcttcgcccacaggcgggcggtaatggctggcagcatcatgagtccgacggacatgagtgtgccgagggcttgaaagccggatacgaggttcatgacgaccaggacgagaaagaggacgtgccaaagcccgcctttgccgccgacggatttgagaaacagggggtcgatgctttcgagtacgagcgggcggtagatgacggcaagggtaatgagcgtgaggctggagacggcggcgatgagctgcagggcaggaatatcgacggcaagtacagagccgaaaaggaggtggagcaaatcgacgctgctcccgtttttgctgacgaggactacgccgatggcgaggctgctgagataaaaggcggcaaagttggcatcttctttcagggtggtgaagcggctgacgagtccggcaagcagtgccatcagcatgcctgcggctacgccgcccaaacccatggcgggcaggctcaagccggcaaacatgtagccgacggcggcaccgggcaggacggcgtggctcaatgcgtcgcctatcaggctcatacggcgcatgacgaggaatacgccgacgggtgcggcactgagggacaggcagaagacggatgcgagggcgtagcgcataaagtcgaattctgcaaagggggcaaggagcaggtcgtagagattcatggtttttcggtttcagacggcatttatgaggcgcaccagtcggggctttcctgttgctgcattttggcgttggcttgggcgaggtagggttctgtcagaatggtctcggttgcgcctgccgcaattttttcgcgggcgagcagcagggtattgggaaagtaggcacggacttgttcgtaatcgtgcagtacggcgatgatggcgtgtccgccgcaatggcatttctgcaatacgtcgagaagctcgtaggttgtccgtgcatcaacggcattgaagggttcgtcgagcagcaggaatttggcattttgaaccagcattcgggcaaaaaggacacgctgaaattgtccgtttgagagataggcaatctgacggtcggcaaaccgttgcattccgacgcgctccaaggcttcgtgaacgcgttgtttttgagcggtatttatccctttgaaaaagccgatttcataccatagccccattgccgccaagtcgaaaacggtcataggctgggagcggtcgatatcggactgctggggaaggtaggcgatgttctgacgggtcaatccgtccagccggatgctgcctgtatcgataggctgcaatcccatcaaggatttgagaaaggtggatttccctgcgccgttgggaccgaaaaccgcccacatactatgttcttcaaaagtaatgtccacatggtgcacggcaggtcggcggcggtagctgacggtcaggttttcgacaatgatgctcatgcggatactgcccaaaagtaaacgccccataaaagggatacggcaatcagggcaaggatgaggcggaaggtcaatcctgatagtaaaagggaaggtgtcatgatgatttgcggttttgaaagggaaggcggtaaagcgtttatcgttatatggctgatatgatactgtataacgtttggtctgtaaattatgcttgaataggcgggagtgattgttaatcaaggtggatgaggggcaggcatatcgttgacttgccggcatcgcagcaataagaaatgccgtctgaaggttcagacggcattgggggaaaacggtttgaatcaacctttgcgtgcaggcagtttttctttgatgcgtgcagctttaccggtcaggccgcgcaggtagtacagtttggcacggcgtacgtcgccacggcgtttgacttcgattttttcgacggtcggagagtacagttggaaagtacgttcaacaccttcgccgctggagattttgcggacgatgaagttgctgttcagaccacggttgcgacgggcaataaccacgccttcgtaggcttgcagacggctgcgggtaccttccacgacgcgtacggatacgactacggtgtcgcccggtgcgaattcggggatttctttattcaggcgggcaatttcttcttgctcgagctgttgaatcaggttcattgtttttttcctaaattatgattggatttcccgttgctcttgccggatggtttctaagaggcgggattcctttgggattaaaacgcgcttttccaaaagatcgggtctgcgctccaaggtgcggcgcagcgattgttccaaccgccattccgctatcaagccatgattgccggaacgcaatacttccggaacagccataccttgaaattctaagggtttggtgtagtgggggcagtccaaaatgccgcttgagaacgaatcctgttcggcagactgcatatcgcccaatacgccgggtacgagcctcaataccgcatccatcagcatcatggcgggaagctctccgccggaaacaacgaagtctccgatgctgatttcttcatcgacgctgctttgcagaagcctttcgtctatgccctcataccgtccgcacagcagaatcagatgcggaagttctgccagttctaccgctttttggtgtgtcaagcggtttcccttgggggctgaggtagatgacttttgcagcttgggaggattgtgttttggcgtgttctattgccgcatgaagcggcggagccatcataatcattcccgggccgccgccgaacgggcggtcgtcgatgtagcccaatctgttgtcggcaaactttcggggattgactgcttcaaactgccagattccctgtctgttcgcgcgtcccgttacgccgtagcgggtaatgctgtcgaacatttcggggaaaatggtaactgcctggataagcatcagtagtccaaaccccagtcggcagtaatggtcttgctgccggtatcgacggtttcgatatattgggaaacgaacggaatcagaatctgcccgtgttctccgtcaatcatcaatacgtcgtttgcgccggtttccatcaggttgcttaccttgcctaaaacggtatggtctttgttgacaacggtcatgccgaccaagtctgtccagtagtattcgtcttcttctgtcggggcgaatgcttcacggggtatttcgatggtgtaaccgcgcaatgagaatgccaagtcgcggtcgtttatgccttcgaatttgacttggagttcgccgttgacgacttttccggcttcaagggtaacgctgatggttttgccgtccttgaccaaatgccactcggggtagtccaaaaggctgtcggaatattcggtgttggcggcaattttcaaccagccttttatgccgaatacgcctttgatgtagcccatggctacccggttttgagtgtctgtcatggcggcaaatgcggattaggcggctttttgttctttaatcagttttgcaacggagtcgctgacttgcgcgccttgtgcaatccagtggttcaggcggtctgcattgaggcggacgcgctcttgtttttcgttggctacggggttgtagaagcctacgcgttcgatgaagcggccgtcgcggcggctgcgtgagtcagtaacgatgacgttgtagaaggggcggtgtttcgagccgccgcgtgccaaacggataactaccattttgagtccttttgagaaaatcggatatatggaaactgccgattttaggttattttgtggtcggtgcgcaagtttttatttgttttttctgttgttttgtctgccgcaaggttcagatatgcgcggtacaggtttttttcggtgtccgattccttgagggtaaatcctgatttttcagcaagtttgatcatgggggtattggttttgagaatgtcggcactcatagtccggtagccttgctgtgcggcggtttggatgatgagttccatcattttctgtgccagtccgctgccgcgcatatgttccgccagtgtgatgccgaattcgcattcgttgcgattcaggcggctgtggcggacgacggcgacgatgttgctgtcggcatcctttgccgtccatgcggcttcacagtggtaatcggggttgcacaggcgtgccaacgtggctgcgggcagttcgttggtgtgggtcatgaagcgtgtgtaccgtgcttcgggaccgaggctgcggacgaactgctgtttggcttctgcgtcttcgggcaaaatgggggtaatggtaacggtcgtgttgtttcttagggacagtgttttggggtatgctgcgggatagggggcaagtacgttgggtacggctgctccggtttcggttttgctgccgagcagttctgcggcggcttcgcttgtgtggcggagaaattcggcggctgtcgggtttttgtgtttcaggtatgcggcggcactctgcatttttgcggcggcatgttcgagggtttgggcggctttgcctgtgttcttgcgtttgggcgtgtcgtgtgtttcgggtgtctttaagaggaaatcgctgctgtattgtccgccgttgaggttgagggtgatgccgagaatgtgttggcggtattcgggaatgacggtcagtgtgtgcaggaactggtcgagggtttgtgtgccgtcgagttcggcaaagcgggcaaggtggcggctgtcgagcgtggtaaacggcgggagtacggcagtggtttgtccgttgcagcgtgcggtcaggatgtcgccatagagggggtggctgtcgaattggaattgtacggcgttatgggtggtgtgccggtagggggggaggtgcagggcttcggcgagcagggaggggtttgccgctgcaagggcttttttgatgttttggggttgcggtgttttcagacggcatggctgcggcggtgcaatgtcgagctgtgcctgtttcagggcggcggcggtgttgcggtaggaaagggtgcggattgcctgagtgggggtgtcgaaatgggttatgccgtctgaaaaggggctgctgacgagcaggggtttggcggtctgttcggacaggcggataagggcgcgtgctgtttttttgtaatcctcgtgtccggagggactgaggatggttaggacggcttgggtgtcggggtgggcaagctgacgtgaggcgatgtcgtggcagattgagggtgtgggtgtgccggtcaggtgtccgttgcggatgtggtggggaaggttgggaaagtggagggtgaggttttttggcgcgtgcgcgtgcagccattcggcaggcgtgtcggacaggatgtcgagtcgggacaggggtggaaggtcggacagttgggcgcgcagtgcggcttcgaggtcgtcggcgttgaaactgacgaggaagttgcagtgtcgggcgaggcagtgcagtacggcacggtcggtttctgtcgtgcggcaggtgatgtggagaatcagcggcgtatggcgggtaaattggcggattgcgctgaacagtttgcgctgatcctcttcagggttgtggtgtaggacggcggttttggtgtgcaggctgtgtccgaagcggttgagccaatcggcggatgtgatggggctgatgccgggatgcaggctgatgtggcgggatgtgccttgacggagtttgttcaggatgttgtcgatttggcggctgacggcggcattgccggtcagtatggcggtatggcctgcggcgtatccgtcttgggtactgatgttgagtccgagtgagggcagttggatgcctgcggtggtgcaggcggtgatgttgagtccgttgccgtggtgtttgcggatggcagtttcggcggtgtgcagttctgcggcagacaggttgtcccagtcctgtatgaggatgatgtgtcggagctgctttttgcggcaggttttgaagagggtgtcgtaactgtcgggtagggtaacggcaataatcaggtctgcattgccggggattttgttgaggctggtgtaggcgggcagtccggctatggtgtggtggcgcgggtttacgggggtgatttttccttgaaagggcgtactcagcaggttgctgagtacacgttcgcccaggctgtacggttgttcgctcgcgcctatcaggatgatgtggttgggcatgaagaagtagcccggatcggtttgtgccgacatgatatattcctttgcggacggtatgtgcgtgatttttggagagacacccgctgtgtgtttgttttggggtaactgtttgtgcaatgccgtctgaagccggttcagacggtattatggtcagttcgcacttttttctgttttggaaccggtttttttcttgggcaggataaagcgcatccgcagaccgttcggtttgatgttttcggcgatgattttgccgcagtgctgttcaataatatgttgggtcaatgcaagccccagtcctgttccgggtttgttggcactggagtctgcacggtagaaagcggtgaagatgtgcgggagctgcatttcgtccacgccggggccgttgtcggtaacgtcgattatccagtgtttgtggtcttgtccgatgttgatcaggatggtgctgccttcgggactgtagttgacggcgttgcggatgacgttgtcgaaggcgcggtacaggtagctttcgttggcaaggatggttgtgttttcggggatttttccgtcggcagacagggtaaccgtttgtccgtttttctgggcaatgctttgattgtcttctaccaggttgcccaggaagggcaggagtttcaggctttctttttccaaagccatattggaagtttcgagacgggacagggttaacagttccccggccagcgtatccatgcgggtcagttcgccttccagccgtttgagatattgctcctgtttttggggctgcgcctgaatcagtccgacaattgcctgcatgcgcgcaaggggagaacgcatttcatgggagacgtgatggagcaggtggcgttctttggcaacgagtttttcgagtttttccaccattttgtcgaattggatggcaagatgggacaattcgtcgtcgcggtcgtcgacctgttgggagatacgggtttcaagttctccgtttgccaccctgtccatgccgttgcctaagattctgatgggtttggcaatgttgccggcgaggatatatgccatcagcagtccgacgatgatgatgaaggacaatatgatgagttcgtgccaaatcggggcgagcggcaggccggggatcaacagggggctgggcaggcggcgggcttggagtttgtcccagtctttggtgaagaacaggtattcttcgccgaagcggtcgtattcgatatggacgaggttggaatgcgggtgtccggcggcgaaaagccgggcgcgttcgatggtatagctgtcgatataccggttcaggatatcttttttctcgtcgccctgtataacgtacacgcccgatgagacggggctgtctttccattccgtcaggatttcgcgcgcacccgcgtccccgcgtgcccggaatgcggaaatgatgctgcccatcaaagtggtttcgatggtgcggcgttggttgaactggttttcggcaagggtgttctgcaccagccagaaagaaaaactcgccacaaagattgcacagacgataaccgcgcaaaatgtggcgaaaatgcgttggaacagtttcatttatctgtttatttcagtttttgacaaacaggtagcccaagccgcgtacggtttgaatcagagaggcatcgcccaacttgtggcggatgctggagatgtgtacgtcgatactgcggtcgaattttgccagcttgcggtcgagtgcttcgacggacagggtttctttgctgactacctgtccggcatggcgcatcaggacttcgagcaggttgaattcggtgctggtcagttcgagcggcatgtctttgacggatgcctggcgtttggcggggtacaggacgacatcgctgacggagatgctgttgggtgcgttgttctgttcgccgctgtgttgtgcgcggcgcaggatggcattgatgcgtgccaagagttcgcgtggtgtgcagggtttggggacatagtcgtccgcgcccatttccaagccgatgattcggtcgatgtcgtcgcctttggcggtcagcatgatgatggggacggtgcttcgggcgcgtacgtttttcaagacatccaagccgttcattttgggcatcatggaatccaatacgactacatcgtactgcccgctcaggatttcctgtacgcctgcttccccgtcgggaacgctgcggacgttcagaccttcggcgctcaggtattcggtcagcagttcggttagcagggcatcgtcatctacgagtaatacgcggctcatggtgtttccttttcgtaagggtatgccccgaccctgtttcgggcggggcgtgaaaagattgtttgacggtttatcttaacacggctgcaatgttttttgatagcgtatttccctaccggtttgctgttttttgcaatgtcttgcatggagctttacatttcgggcggtatccgcatccgccggcgcgggtcatttgcagggttttgcttccggatgaccgggcgcggcggcgaaggctttgcagtctttgagcagttcgggtagcagcggcgcccatacgggcagtttgcggatttcgtcggcgtatcggggcatcaggtaggggtaataggactgtgtcgcccgcatccattgttttgcttctgcaactttgccttgccgcatcaggtagagggcgatgcggtaggtggcggagtgggggcggtattttagtgatttgagggttgcttcttccgcccaagtctgggtttcggggtattccggcagggcgaagtttacgagggagaagtcggcataaaaggacagcatcggactgtttgcggaaatatagcgcaactcgttgattttccggttgagggttttggcactgtcgtcagtggcgggggaaaaggcgttaaccagccgggtgtatgtccagtccaagtgcagcaatcctgcgaatatggcggcggaggcggtcagtatgccgagattggcggcttttttgaaggcgatgccgtctgaagcctctgcgggggacaggaagagcatcagtccgaaagggatgaggaaatagacataccacaaaggatattcgagcatactgtggcacatactgacggcaagcgtgcagattaggaaaagcgatgcgggggtcagggggcgtttaagcagcccggcaatgcccgtcagcagggttgcggcaaccagaagcgtgccgctgattcccatctctgcaaggagttggaggacgatgttgtgggaatgggtgaacaagttgctgaggaggttgtcgtatatgttgtgctgttcggcattgatgaggaaggtttgttgggcaaaactgttccagccgtgcccgaatatcggggcggactggaaggcggcaagggctttattccattcgatttggcgcggcaagtctgtgaaaccgccgttggcgacgcgttcgacggcagtttcgtagcggatgccagtaaaggtttccagaatggtgttcatggaaaattggaacagcgcggtaaggaatacggctgcggctatgccgagcatcgtccgcctgttggatttgtccgaacggaaataccagaagggaaggatgagggcgatggcggctatgtaggtcaagatggtgcgcgagttgaccaaacctaaaacggcggtctgcataatcaggcagattacgccgagggcggcggggatttttcgttgtccgttgaggtaggcggcggcgagtatgccccacatgaggtagtgtccgaggttgttgcgctgcccgatgtgtccgattacgccttgcccgctgtaaacgatgatgttttgaaacagaggggtgtcttcccagccggcaaactggatgacgacgatgcaggattgaagcagggagccgataagcagcgaccaggcaaacagggtcacgatgcgttcttgtccgaagtgtgcgaccaagctccggcaggcccacgcgctgacggcgagcaagatgaaaatccaagagacgatgtcgttcataccggggtaaatcaggttcatcaggcgtgcctgaagataccaaaacgccgccattgcaaacagaaggaagctgatggcggggattttgacatcaaacagtttttttcctgccgtgaggaacaacaggacaatcaggccggctgcggcggcggcatcgtggtaaaagtcgggcgacggtttcagtttgagcgcgaaggtaaaggggacgatgcctatccaaaggaagcagggcaggatgtaaatcggcagtttggcggcggggtgcgcgccggatacggtcgtttcagcgggcattgtttgtttccttgtattgtttgacgaacgacaggcaggatatgaagaagatgatgctgaatactgcggaaagcgcggcgcaaatctgttctgcgggataggcgtcgaacaggcgcatgacggcttcggcaaagtaaatcagaaccagcatggagctgtattggtaagtatagattttctttttcaagatgcctgaaagcggcagacagagggggagggctttgagcgcgagccacgagccgcccgggcgcaacggtgcaatccacagttcccaggaaagggacaggattatcagtgcgatcaggctgaaagaggcaaggaggtaagcggtttgtctgttcacggcggtctttacggtttaagggcggacaagggggagcggtatcccaaatcctgcaacatcgaaacggtttcataaacgggcagtcccataatgccgctgaagctgccttcgatagattggataaagatgccgcctatgccttgtacggcgtaggcaccggctttgtccatcggctcgccgctttgcacataggcggaaatttcttccgaactcaggggcttgaaaacgacgcggttggtttggacgcggcttgacgttttgccgcgataatgaatgcagacagcagtcaggacggtatgttgtttgccggacaatcggtttaaaaattcgattgcttcggcttgggagcggggtttgcccaatatgatgccgtctgaaacgacgcaggtgtcggcggtaatcagggggaaatcgggcattgtgccgttggtttcgcaaaagagggtcagggcggttcggtttttttcttctgccatcctttgaacgtaagcgaaaggtgtttcgccggctttaacggattcgtcgatgccggcaggcagttggatgacgcggtagcccaactgtgtcaggatttccattcggcgcgggctgtttgaacctaaatagagggtattcaaaggtattccttaatctgttgcggtatgaggcggaggttcggacggcatagtgtcaggttgttgcaggcggccgtatgtcgccatcctgttctgaacgtggcgtgaaaaagcgtccgaaccaaatacctgcttcgtataagagaatcagcggaatggcaagcagggtttgtgaaatcacatcgggcggcgtgatgatggcggcaatgacaaacgcgccgacaatcacataggggcgggcgcgtttgagctgtccggttgttaccacaccaattttggttaacaggataacgacaatggggacttcaaacgttgtgccgaacgcaacaaacatccccaagatgaaggagaggtatttgtcgatgtctgtcgccatattgacaccgacaggggtaacgctggcaaggaatttgaaaatgacggggaaaaccaaaaagtaggcaaatgccatgccgatgaaaaacaggctgacgctggagaggacgagcggcgtaatcaggcgtttttcgttttggtagagtgcgggcgcgacaaatgcccagatttggtagagcgtatgcggcagcgaaattaaaaatgccgccatcagggtaactttgaccggcacgaaaaatggtgcgatgacatcggtggcaatcatgctggtgtctttgggcaggtttgccatcagcgggtcggcgataaaagtatagagttgttgggcaaacggcattaggccgaaaaagcagactaagatgccgacaaccgtccacatcaggcggcggcgcagctcgatgagatgctcgacaagcggttggacgggttgttcgttttgtgtttcggacaccggattgctctctttatgatttacggacgcgcaatttaggtttggcgcggtgtttcggacgaaaatcgcgtttgcggcttattgcctgtttgcgcagggaagtggtgtgcggaacaggcgtttcaacagcagtatcgatatagctgacttcgacggtctgtacgacgggtgcggcggcagaagcagtcaggtattcccgccatgcgcggtcttggtcggtttccgcgggttcggctgtactgccggtttgcccgctgtccccaagggtttcggcggaagcgtaggaacgttcggacggcataacgtcggaaatgccgtctgatagggtgtttgccgcatcgggaagcggattgccgttttcatcgacaccgaaatcggcaggtgtccgctgttcgggcagtttttcccaaggcttcagaccgtcggaaatgtcgtgcagattgccttccatatccgtaccggtttctttgaggctgtctcgaacctgagcggcggcagcttcaaattcctgctttgccttcctcagttcttccagttcgatttgagtgtcaaattcctgtttgacgctgccgacaaagcgttgcagcctgccgatgagccgtccggcggtgcgggcggcctcgggcaggcgttcggggccgaggacaatcagggcgataatgccgacaaaaaccagctcgcccaaaccgaaatcaaacataaattacgctttgtcttcgtcttttttgtgttcgattacatcgtctttttgggcttctttgccgtctgtaccttcgttcagcccctgtttgaagtcatgaaccgcaccgccgaggtctttgccgacgttgcgcagttttttggtgccgaatatcaaaacgacgataatcagtacgataatccagtgcgtcagagaaaaactgcccatgatgtatccttaagtaagtattaggggttgattgtgaaataacggtttatacgggtgtacccatgatgtgtatatgcaggtggaagacctcttgtccgccgccttttccggtattgatcagggttttgaagccgtctgccagtcctgccgctttggcgatttcgggaactttcaacatcattttgcccagcagcatctgatgttcgggcgcggcgtgtgccaacgaatcgaaatggactttgggaatcagcagcagatgaaccggagcagcggggttgatgtctttgaaacaaaccatttcgccgtcttcatagacggtttgcgccggaatgtctttggcggcgattttgcagaaaatacagttgtccataacggctccgatgccgtctgaaaagcggtcagacggattgaatgtgggaaagtgcggattttaatataaattcaagattctgtgcgagcggctttttcgaccagccccgacagcccctgacggcgcgcaagttcgtccaatacgtcttccgccttcaggtcgtggtgtgtcagaagaatcatggtgtgaaaccataagtcggcaacttcgtaaaccaggtgggacgggtttttgtctttggatgccatcaacacttcgcccgcctcttcaatcactttttttaggattttgtcttcgcccttatgcaagagctgtgcgacgtaagattcggacggattggcagattttcgctgggtgatggtttgttggatggcggatagtacggaatctcccatgattttccttctgtttgtttctgtttgttcggaatgataggctaaacggctgctctcgggcaatacgcctgttgcgcttcgttggaaaatgccgtctgagcgtttcagacggcatttgtgctgttgcaaatgtaatttgcttacaggtttggactcacaataattttaacggcggattcgttgttgtgaatcagacgctcgaagcctttggaaaccagctcgtccagcttgatgcgctgggtgatgaaaggctcaaggttgattttgccttcttcgaccagtttgatggtttcggcgtggtcgttgcagtaggcaatcgtgccgcgcacgtccaactctttcatcacgacgctgtggacgttgatggtggcggggtggctccagatggatacgataaccaaattggcggcaggtttgcaggcttcgaccaaagtatccaacactttgttgacgctggtgcactcaaatgccacgtccacgccttcgccgttggtcagttttttcacttctgcaacaacatcgacttcggacgggtcgaggatgtagtcggcaacgccggattcgcgcgctttgtctttgcgtgctttactcaactcggtgatgatgactttgatgcctttggctttcaacacggcagccaacagcaaaccgatcggacctgcaccgccgaccaatgcgacgtcgccttctttcgcgccgctgcgtacataggcgtggtgtccgacagacagcggttcgatcaaagcggcttgatccaacgggattttgtcggaaatcggatgcacccaacggcgtttgacggcgattttttcggacagaccgccgccgcagccgcccaagccgataaagttcatatctttggagaggtggtagttgctgccttctccggtcggtacgtcatcgcggatgatgtagggttcgaccacgacgtgttggccgactttgatgtcgtccacgccttcgccgacggcatagaccacgccggagaactcgtgtcccatcgttacgggtgcggactcgccggaaatcgggtgcggatgaccgcaaggcggaatgaaaatcgggccttccatgaattcgtgcaggtcagtaccgcagatgccgcaccaggcgacattgatgccgacagtgccgggggcgacggtcggttcggggatgtcttcgatgcggatgtcgcctttgtcgtaaaaacgtgctgctttcattgtaacgctccttgttttcaagtaggaataccgtctgaatctggcaggcggcggttgaaatgggaatggcgtgaagaagcttgaccgtttccagttgaatctgtttagatattttactacaagaggagacctttgcaataacataggttactaaaattttatgctcaatctcattttcaaaatgcaaaacttttctgatttttcctactttttgctcaatattaggaaggttttaggcaattgaaaattttttggcgcatttttatgcgtcaaatttcgttaacagactatttttgcaaaggtctcaagagatgtgtttaagcacgcggaaggctttctgtttgcgtcaggtcaaataatgatgtcgtctgaaaaccgaatcggcttcagacggcatttatagtggattaacaaaaaccagtacggtgttgcctcgccttagctcaaagagaacgattctctaaggtgctcaagcaccaagtgaatcggttccgtactatctgtactgtctgcggcttcgtcgccttgtcctgatttttgttaatccactatatgtcgtaacggtcggattgggtaggttggcgcacctgtccggttttcggtttggcaaaccgtttttttgttgggtccagtgttttctgataggcggttgcggcatcggatttgcccagccctgccagcacgcggatatgctcggcagcagattgtgccagaggttcaagggtgtagccgccttcgagtacggatatgattttgccggggcagcccgatgccgtctgaatgattttgtgtgtcagccaggcaaaatccgcctcgtgcaggttgagcctgcccgattcgtctagacggtgtgcgtcgaatcctgccgacagcagcaccagttcgggtttgaatgcggcaagtcggggtagccactgcctgcggacggcttcgcggaatgtgcggctgcccgttcctggcggcaagggcaggtgcaccatattgccgccgtcgggcatatcgttgttttcggggaaggggaaaaggtcggtttcaaacaggttgaaaaacaggatgcgcggatcgtctttgaatatttctgccgtaccgtcgccgtagtggacatcgaaatcgatgacggcaatgcgtttcaggcggtattcggcaatggcatgcatgacgccggcggcaacgttgttcagcaggcagaatccgccggctttgccgctgcccgcatggtgtccgggcgggcgggcggcgcaaaaggcatgccatgctttacggttcatgaccatgtcgactgcctgaactgccgaaccggcggcaaagcgtgcggcagacagcgatcctgtgctgattgcagtgtcgttatccaggcgggaaatcttgcctttttggggcaggcaagattccaaacggttcagatatttgctcgagtggacaagtgcgaggcgcgtatcgctgatttcttccgcctctatggtttggaggtgctgccaaataccggcgcggcgcaatgcctgctcgatgcagaggatgcggtcgggcgaatcgggatggtttgcgccgggttcgtgcccggcacaggcgggatgcgaaatccatgcggtgcgggcgtttttgcccaaaaaaaggcgcaacagtgcatagaatttcaagattaggcgggtcaaggacatgggtttgtggacgggcaggctgcggtatacggtcggtacggacggcaaacccgatatattgtttacggtcttatgttattatatacccctctcgattttcaaccatattagaaagaacggataaattatgaatcaagctgttgcacaatttgctcctttagtgttgattatggtggtgttctacttcctgatcatgcgtccgcagcaaaagaaattcaaagcgcatcaggcaatgcttgccgccttgaaagtcggcgacaaagtggtcttggcggcaggtttcaagggtaaggtaaccagagtcggcgaacagttttttaccgtggatatcggacagggtacaaaaatcgaggtcgaagtggaacgcaatgcgattgccgcaaaagtcgattgatttgtgccgacaagccgcatctggaaagcccgaatgcggcactttgttttgaattccaaccgaaggcttgaccatgttccgacacgcagggcggcatattcaggatgccgctttccggtcttgcctggctgggaagggtttttgcctcttctgaaatagcccgattccgacaccaccgaaagggtggggttccaaccattaaggaacaatgatgaaccgttatcctttatggaaatatctgctgattgtgttcacgattgcggttgccgcagtgtattcgctgcccaacctattcggcgaaacacccgccgtgcaggtatcgaccaaccgacaagccatcatcatcaacgaacagactcaattcaaagtggatgccgcgctgaaaaacgcaggtattcagaccgacgggatgtttgttgtggacaattcactgaaagtgcgtttcaaagacacagaaacgcagcttaaagcgcgcgacgtcatcgaaaacactttgggcgaagggtatattaccgcgctcaacctgttggcggacagccccgaatggatggcgaaaatcaaagccaatccgatgtttttgggtttggacctgcgcggcggcgtgcatttcaccatgcaggtcgatatgaaagcggcgatgcagaaaacgtttgaacgttattcgggcgacatccgccgcgaactgcgccgcgaaaaaatccgcagcggcacggtgcgtcaggctggaaacagcctgaccgtccctttgcaggatgcaggtgatgtgcaaaaggctctgccgcagttgcgcaagctgtttcctgaagcaacgctgaattcagacggcagcaatatcgtcttgacgctttcggaagaggcggtcaataaagtgtgttccgatgcggtcaaacagaacatcactaccctgcacaaccgtgtgaacgagttgggcgtggccgagcccgtcatccagcagtccggtgcagaccgtatcgtcgtgcagcttccgggcgttcaggatactgccaaggcaaaagacatcatcggccgtaccgcgactttggaattgcgtatggtggaggacgatcctgccaagttgcgcgaggcattggaaggcaacgtgccgagcggttatgagctgctttcaagcggcggagatcgtcccgaaattctgctgatcagcaaacaggtcgagctgacgggcgacaacatcaacgatgcgcaaccgagtttcgaccaaatgggcgcacctgccgtcagtctgagcttggacagcgcgggcggcagcattttcggcgaactgactgccgcaaatgtcggcaaacgcatggcgatggttttgatcgaccaaggaaaatccgaggttgtaaccgcgccggttatccgtactgccattaccggcggacgcgtggaaatttccggaagcatgacgacagccgaagccaatgatacgtctttgctgttgcgtgccggttctcttgccgcaccgatgcagattgtcgaagaacgtaccatcggtccgtctttgggtaaggagaacatcgaaaaaggcttccattcgactttatggggttttgccatcgttgctgcattcatggtggtttactatcgtctgatgggtttcttttctaccattgcattgagtgccaacatactgttcctaatcggtattttgtctgccatgcaggcaacgttgacgttaccgggtatggccgcgctggcgttgactttgggtatggcaatcgactccaacgtcttgattaacgaacgtatccgcgaagaattgcgtgccggcgtgccgccgcagcaggcaatcaatctcggtttccaacacgcatgggcgaccattgtcgattcgaacctgacttcgctgattgccggtatcgcgcttttggtattcggttccggcccggtacgcggttttgcggtcgtacactgtttgggtattctgacttcgatgtattcatccgtcgtcgtattccgtgcgttggtcaatctgtggtacggacgcagacgcaaattgcagaatatttccattggttcggtgtggaagccgaaagccgaaatggcaggaggcaaggagtaagctatggaactctttaaaatcaaacgcgatattccgtttatgagctacggcaaactgacgaccttcatttcgttggttacgtttatcgctgccgtgttctttttggttaccagaggtctgaatttctctgtcgaatttaccggcggtacggtaatggaagtccaatatcagcagggtgcggatgtcaataagatgcgcgaacgcctcgatacgctgaaaataggtgatgtacaggttcaggcattgggtacgaacaaacacatcatgatccgcctgccgaacaaagaaggtgttacttccgcacagttgtccaatcaggttatggatttgctgaaaaaagacagtcccgacgttaccttgcgccaagtcgaatttatcggcccgcaagtcggtgaggaattggtaagtaatggattgatggctttaggttttgtcgttatcggcatcattatttacctgtcgatgcgttttgaatggcgttttgccgtatctgccattatcgccaatatgcacgacatcgtgattattctcggctgctttgccttcttccaatgggaattttcgctgaccgtcttggcgggtatccttgccgtattgggctattctgtgaacgaatccgtcgtcgtcttcgaccgtatccgtgaaaacttccgcaagccggcgatgcgcggacatgccgtgccggaagtcatcgacaacgcgattaccgcaacgatgagccgcaccatcattacccacggttcgaccgaggcgatggtcgtatccatgctggtgttcggcggtgcggccttgcacggcttttctatggcgttgaccattggcatcgtgttcggcatttattcttccgtattggttgccagcccgcttctgctaatgttcggtttgagccgcgacaatatcggtaaagaaccgaagaagaaagaagaaatcgtggtttgaagcgcatatgccgtctgaacattgccgtctcaagcagacaatgcttcagacggcatttttaacggttacttccacggtcttaaaatattgtgcagaaatgcgggaattgtgtcataatgccacgttgtcctatcttgggcatagggagtttgccgttgtcttcaggcttggcaaacttgtctgaatccctatggggattcttatatttttggagttttcattatggcactgaccgtagaacaaaaagcacaaatcgttaaagatttccaacgcaaagaaggcgacaccggctcttccgaagtacaagtcgctctgttgactttccgcatcaacgacctgaccccccacttcaaagccaaccccaaagaccaccacagccgtcgcggcctgttgaaaatggtcagccaacgccgccgcctgctggcctacttgcgccgtacccagcccgatacgtatcgcgcgttgattacccgcttgggtctgcgtaaataattacgctttccgacaccgcccagaaaaatgggcggtgttttcttttctgttgctttccgacaagctcaaatccatatttatagtggattaaatttaaatcaggacaaggcgacgaagccgcagacagtacaaatagtacggcaaggcaacgcaacgctgtactggtttaaatttaatccactatattgcccgaaaaccgcataaactaatataatataaagttctttggaatcttgttccatttcatgctgcccgtgcgctttacaagagtttcagacggcatcaaacgtttaactcccgccagcaatcaaacagctttttatcacccattcgaaaatccgttttgccggtactcgtctttttattggagtattgccattatgaccgcaaccactgcgtcttcagccaaaccttatctcaaaatccaaggtttggtgaaaaagtttggtgacaattacgctgtcgataacatcgacttggacatttatcaacacgaaatcttcgcccttttgggcagttccggcagcggaaaatctacactgctgcgtatgctggcgggtatggaaagtcccaatcagggaaaaattatccttgatggtcaggatattaccaaacttgcaccctatgatcgccccatcaatatgatgttccaaagttacgcgctttttccgcatatgaccgtagaacaaaacattgccttcggtctgaaacaggacaaaatgcctaaaggcgaaatcgccgcgcgcgtcgaagaaatgctccgcctggttcagatgaccaaatttgctaaacgcaaaccgcaccaattgtccggcggtcagcagcagcgcattgctttggcacgcagtctggcaaaacgtccgaaaattctactgctggatgagcccctcggtgcattggacaaaaaactgcgccaacaaacccagcttgagttggtcaatacgctggaacaagtcggcgtaacctgtattatggttacgcacgaccaagaagaggcgatgacgatggcgacccgcatcgccattatgtctgacggtcagttgcagcaagtcggcacacccagcgacgtgtacgactatcccaacagccgcttcactgccgagtttatcggcgaaaccaacatctttgacggtgtggtgattgaagatcatgccgactatgccgttatcgaatgcgaaggtttggaaaaccacgtccgcatcgatcacggtttgggtggtccgagcgagcaggacctttgggttagtattcgaccagaggatattgatttatataaagaaaaacccgaatatttgggcgactacaactgggcgaaaggcacggtaaaagaaatcgcctatttgggcagcttcgccatttaccatatcaagctcggcaacgggcgcgtcgtcaaaagccaagtccccgccccttactggtatgtgcgcaacattacaccgccgacttgggacgaaaccgtctatatcagctggccggaaaaccaaccgactccgttgttccgttgatttaaggggaatgcaatgaaccttaataaactgaaaaacaaactgttccgccgtccggggcagcgtgcggtgattgccgtaccgtatatttggcttttggtgctgtttctgattccgttcgccatcgtgctgaaaatcagctttgccgaacaagaaatcgccatcccgccgtttactcctttaacgacgatagatgaggatttgggtcgtctgaatattgctgtcagctaccaaaattatgcagacatcttccaaaatttttggagtacgctcaatccgttcggcgacggtgaaaacagcaatatctatctgatgacttattggtcttcaattaagactgcgctgactacgacggtaatttgtctgttggtcggttatccgaccgcctatgcgatttctcgtgccaatccttctgtccgcaatggtttgctgcttgccattatgctgcccttttggacatcgttcctgttgcgcgtctatgcgtggatgggtctgctcgggcataacggcattgtaaacaacctgttgattaaaatgggtattatcagcgagcctttggatttgttctacaatgccttttcgctcaatttggtgatggtttacgcctatctgccgtttatgattctgccgctatacacgcaactggtgaaactcgacaaccgcctgcttgaagcggcttccgatttgggcgcggggccggtcaaatcgttcttgacgattaccctgcctttgtcgaaaaccggcattattgcaggctccatgctggttttcgtccctgctgtcggcgagttcgtcattcccgagctggtcggcggttcggaaaacctgatgattggtaaagtcttgtggcaggcgttcttcgatcaaaacaactggccgctggcttccgccgtcgccgtcgtgatggtcgcgctgctggtcgtgccgattgccctgtttcagcattatgaaaaccgcgaattggaagaaggagccaaataatgcagaaatccaaattatcttggttcttgaaactgatgttggcactgtcgctggcgtttctgtatatcccgctggttgttttggtcatctattcgtttaacgaatccaagctggtaaccgtttggggcggcttttcgaccaagtggtacggcgcattgctggaaaacgacaccatcttggaagccgcttggctgtcgctgcggattgccgttgtgtcttcgcttgccgccgtcgttttgggcacgctggcaggctatgcgatggcgcggattaaacgttttcgcggcagtaccttgttcgctggcatgatttccgcacctatggtgatgcccgacgtgattaccggtctgtctatgctgctgctgattattcaggtacagatatttttgcagggcagcgaatggttacaacatctctacttcgatcgtggctttttcaccatcttcctcggacatacgacgctgtgtatggcgtacattaccgttgttatccgttcgcgtctggttgagcttgaccagtcgctcgaagaagccgcaatggatttgggcgcgcgcccgctgaaaatcttttttgtcatcactttgcctttgattgcccctgccatcgcttcaggctttctgctcggcattaccctgtctttggatgatttggtgattacctcattcctctccggccccggttcatccacattgccgcaggtgattttctccaaaatcaagttgggtctcgatcctcagatgaatgtcttggcgaccatcctaatcggcatcatcggaacattggtcatcatcgtcaattattggatgatgaggcaggcaaccaagcgtgaccgagaagcggcagaagcctaccgccaggaaaaattggctgccgagaaagcaaattaattaataaggcaggctgaccgcatgactgggtcagcctgttttcttcaaccgattttctgtttggacgatatggcccgacagcctgtatcattccgtccgaaaatacacctgataaagcaaacacaatgattcgccctgattttcaagaatatctgccttcttattatttcagttcggttaatcctcatactgtttatccgaaacttcaatgccgtctgaaaaccgatacctgtatcatcggcggcggattgggtggtttgtgcactgcattgcccttggcggagcagggacatgaaacggttgtgttggaagccgcgcgtatcggtttcggcgcgtcgggacggagtggcgggcaggttatcagcgattacgcctgcggtatgggggaaattgaaaaacaggtcggcttggagcaggcgcaatggttttggcaacagtctttgcaggcggtcgaactggtggacgaacgcgtccgcaaacatgccgtcgattgtgattggcagcgcggttatgccacggttgccgtccgtccgcagcattgggaagagttgcagcagtggcatgaacacgcccaacggcattacggtgcgagtcattatcaactttgggataaagccgagttgaaacagcagcttgacagcgatatgtaccaaggggcacaattcgaccccttatccggacacctgcatccgctcacttacactttgggcatcgctcgtgccgctgccgaagccggtgcgcagattttcgagcaatccccgatgacgtgcatcgaaccgcatcaaaacggttggctggtttacacgcccgaaggcagcgtcgagtgcaaaaatgtggtctatgctgtcaatacttatgcaggtttgaacccgatattccggcctttggaacgcaaggcgattgctgtcagcacctttattattgcgaccgaacccttgggggcgcgcgcaaaagggcttatccgtaacaatatggcagtatgcgacaaccgccatattttggattattaccgcctcagcgcggacggcagactgcttttcggcggtaaggataacgagtttatcgacaatcctgagcgtatgaccgagcttgtccgccaagatatgcttaaagtttttccgcagcttgccgatgtcaaaatcgaatattcgtggggcggggagtgcgacattaccgccaaccttgtcccgcatttcggacgtttagccccgaatgttttttatgcgcaaggttattccggacacgggatggcgataacaggcattgcaggtctggcggttgccgaagcaattttaggggacgaatgccgtctgaagccgtttgagcggttgcgccagccgaatattatcctgcaaccgtttttgcgcaaactcggttctttcctcggctcgaaatattatcagtggaaagacagccgttaagcgtcgcaggcagtatagtggattaacaaaaaccagtacggcgttgcctcgccttagctcaaagagaacgattctctaaggtgctgaagcaccaagtgaatcggttccgtactatctgtactgtctgcggcttcgtcgccttgtcctgatttttgttaatccactatatgtttatccatcggcggcaaacgtgaaaaatgccgtctgaaacccgattttcaggcttcagacggcatagccgcccttattccacgcgttcgccgtggatattcagatccaaaccttcgcgttcgacatccttgccgacgcgcaggccgccgcagattttccccacgaccttcaaaatcgcccaactcattagcccgctgtatgccgccataacgaccccgtcttttacctgtatccacaactgctgccaaactgccgcatccccgccgaaaatgcggttgtcgaaaaagatgccggtcaatattccgcccaccagcccgccgaatccgtgtatgccgaaagcgtccaaagaatcatcgtaacgcaatttgtgtttgacgacggtgacggacacaaagcacgcggcggcagtcaatataccgatggcggccgcgcccgacgggccggtaaagccggcggcaggggtgatgccgaccagaccggaaaccgcgccggaagccagccccaaagcggaaggtttgtgtcccgctattttttcgcaggcaagccagcctgccgcgccgaatacggccgacacctgcgttaccgccatcgccatacccgccgccgcgtctgccgcaagcgccgatccggcgttaaagccgaaccagccgaaccacaacattgccgcgccgatcagtgtcatcgccatattgtgcggaggcatcgcctcgcgcccgtagcctatgcgcctgcccaaaaccaaggcggcgacgagtcccgcgataccggcattgatgtgcaccaccgtaccgccggcataatccaatacgccgcccttgctcataaagccgccgccccacacccaatgcgcgcccggcacataaaccaataaaaaccatatgcccgaaaacagcatcattgccgaatatttcatccgttcggcaaacgcgccggtaataatggcggtcgaaataatggcaaacgtcatctgaaaaaacataaataccggttcgggaacagtcggcgcattgggcgacacggtcagcatctgtgcggtagcgtctatctgcatcccgcttaaaaatacgcgccccaaaccgccgataaaggcatttcccggcgtgaacgctaaagaatagccgacggcgacccaaaggatgcccaccaatgtcgcgatggaaaagctgtgcatcatcgtcgagagcaggttttttttccgcaccataccgccgtagaataaagccagcccgggaagcgtcatcaacagtaccaaggcagccgcagtcatcacccaggcggtatcgcccgaattgacggcggaataaggcttccaccagtttaaaggttctgccgatagggatgccggcagcaaagatgccgcccatatgtgttttttcattttgactaaagtttccttaatggttgagcccgtctttcggaaaggcggggtcggggcttgtccgggagggacgcaagccctgccggaccggggcggcgcggggattttgccgatgtgccgccaatcccttgtttgaatatggaaatatcgcatccgatcccttgcacccgttgtccggcgggaggatttatccttaggcggcgcatatgtgggcgtatggattgtcaacaatttactgtaggaaaatatacagaggtttgggcgataaggcaaaatattgttgacaatatttttattttataaaattaatttattgattaatatattaaaaatttttaattggaaatatagtggattaacaaaaatcaggacaaggcgacgaagccgcagacagtacaaatagtacggaaccgattcacttggtgcttcagcaccttagagaatcgttctctttgagctaaggcgaggcaacgccgtactggtttttgttaatccactataaaaatttatggggctgtcctagataactaggataaactcgattttactaattgttttaaaatggaaatttgaacttttatctcgctgttgttaaaacgtcgttcgtacccctttaaatacagctcaaaatgcgctttgggaatgccgtcaaacttgcgtaaatgacgttttgcccggttccaaaagttcccaattccattgatatggttttgtcgttcagcaaaataactttcatctgcttctacttcgccgtcaaacatttccaaatgcggactgttttgataaataagtaatcgtaaacgatgaaaataataggctgaggtacttttattaacgcctactaactctgctgctgttcttgcagttacacctgcgacaaacagttcaatgagtttattttgtttataccggcttagacgaatttttctcataggggcaactctaacttaatttgaatttccctagttatctaggacagccccaaatttatacaaaaatgagtgcggttcggcgcaaccttgaatcaagttcccgcatcggttttcattgccggtacggatgcgttcaagccggctttgcaaaggccgcgctttcggcaagcggacacggacactgccgacggttgcgccgttaacggggggagggaggagctgcgccgaccgtgtgaatgaaagtgccgtctgaaacccgattttcaggcttcagacggcatttcgcattaatgcgggcggcgcgtttatttgccgcgcatcagttcaaagaaatcgtcgttgtttttagaggctttgattttcccgattaaaaattcggctgcctcgatttcgtccatcgggtgcaggaacttgcgtaagagccacatacgttgtaactggtcgtttgggacaagcagctcttcgcggcgcgtgccggatttgttgatgttgatggcggggaagaggcgtttttccgccatacggcggtcaaggtgcaattccatattgccggtgcctttgaattcttcgtaaatcacatcgtccatacggctgccggtttcaaccaatgcggtggcgatgatggtcagcgaaccgccttcttccacgttgcgcgccgcgccgaagaaacgtttgggacgatgcagcgcgttggcatcgacaccgccggtcaggattttgcccgaggtaggcacgacggtattgtaggcgcgggcaaggcgggtaatcgaatccagcaggatgaccacgtcttttttgtgttccaccatacgcttggctttttcaagcaccatttcggcaacttggacgtggcgttgagccggctcgtcaaaggtggaggagactacttcgccacggacggagcggctcatttcggttacttcttcgggacgttcgtcaatcaagaggacgatgagttcgacttcgggatagtttgcggtaacggcgtgggcaatgttttgcagcatcacggttttaccgcttttgggcggggcaaccaagagggcgcgctgacctttgccgataggggaaatcaggtcgatggcacgtccggtcaggttttcttcggactttaagtcgcgttccagcttcaactgttcggtcggaaacagcggggtcaggttttcaaacaggattttatggcggcatacttccgggtggtcgccgttgatggtatcaagcctgaccagggcaaaatagcgttcgttgtcttttgggacgcgcacgcttccttcgatggtgtcgcccgtatgcaggttgaagcggcggatttgggtgggcgagacatagatgtcgtcggggccggcaagataggacgtgtccgcgctgcggaggaagccgaagccgtcgggcaggatttcaagcgtgccggagcaggtgaaaccctcgccttttttcatcatctggcggacgatggcaaatacgaggtcttgtttgcggaatcggttggcgttttcgatgccgtgttcttccgccaattctaagagtttggaaatgtgcagggtttgtaattcggagacgtgcataataatgatgtattttgaagaggaaaaagacaggcagatgccgtctgaaagaagaagctgaccgttgccggttgctcggggaagggggaattgtaggcagtcggcgcgtgggtgtcaaatattatcgcggacggggcatcggcaggaaatgccgtctgagcggagctgcttggaaaaaaatacccccgcgcttttcaggctcgggggtatgggcattgattatttgttcaattcattcgccaaatatagccaagtttcgatgacggtatccgggttcagggaaacgctttcaatgccttcctcaaccagccatttggcgaagtccggatggtcggacgggccttgaccgcagatgccgacatatttgttctgcttgcggcaggcggagatggcaaggtgcagcatcactttgacggcagggttgcgttcgtcaaacgattcggataccaagccgctgtcgcggtcgagaccgagggtcagttgggtcatgtcgttcgagccgatggagaagccgtcgaagtattgcaggaattgttccgccaataccgcgttgctcggcagctcgcacatcataatcaggcgcaggccgtttttgccgcgttccaagccgttttctttcagggctttgacaacggcttcggcttcgcccaaagtgcggacgaacggaatcatgatttcaacgttggtcaaccccatttcatcgcggacgcgtttcaaggctttgcattccaaggcgaaacagtctttgaagttgtcggcgacataacgcgccgcaccacggaagcccaacatcgggttttcttcatgcggttcgtatacgttgccgccgaccaggttggcgtattcgttggatttgaagtcggacatacggacgatggttttacgcggataaaccgatgcggccaatgtcgccacgccttcggcgattttatcgacgtagaagtcgacaggggacgcgtaaccggcgatacggcgggtaatttccgcttttaattcgtcgtcttgtttgtcaaattccaacaaggctttggggtggataccgatttggcggttgatgataaattccatacgcgccaagccgatgccttcgctgggcaggttggcgaagctgaatgcgagttcgggattgccgacgttcatcatgacttttacaggtgctttaggcatattgtctaaggcgacatcggtaatctgtacgtccaacagaccggcatagataaagccggtatcgccttcggcacaggatacggtaacttcttgaccgtttttcagcaattcggttgcattgccgcagccgacaacggcaggaatgcccaattcacgcgcgatgatggcggcgtggcaggtacggccgccgcggttggtaacgatggcagaagcacgtttcatcacgggttcccaatccggatcggtcatgtcggtaacgagtacgtcgccggcttcgacggaatccatctcggaagcatctttaatcaggcgcaccttgccctgaccgactttctgaccgatggcgcggccttcgcataatacggttttgtcgccgttgatggcgaagcggcgcaggttgcggttgccctcttcttgggattttacggtttcgggacgggcttgcaggatgtagagtttgccgtccaagccgtcgcgtccccattcgatatccatcgggcggccgtagtgtttttcgatggtcagtgcgtaatgcgccaactcagtaatttcttcgtcggtaatggagaagcggttgcggtcttcctcggggacatcgacgttggttacggatttaccggcttctgctttgtcggtaaaaatcattttgatgtgttttgaacccatggttttacgcaggatggcgggcttgcccgctttgagcgtgggtttgaacacataaaattcgtccgggttgaccgcaccttgtacgacgttttcgcccagaccgtaagaggaggtaacaaagacgacttgatcgtagccggattcggtgtcgagggtgaacatcacacctgatgcgccgctgtcggaacgcaccatgcgttgaacgccggcggaaagggcgacgatgtcgtgttcgaagcctttgtggacacggtaagaaatggcacggtcgttatacagggaagcgaatacatggtgcatcgcttctttaacgttatccaagccgttgatgttcaagaaggtttcctgttgtccagcgaatgatgcgtccggcaggtcttcggcagttgcggaagaacgtacggcaacggaaatgtccgcaccgccggcatcggcaaccattttgttccatgccgcttcgatttcggcatcgagctgttcggggaaaggcgtatccaaaatccattggcggatttctttgccgacgcgtgccagttcggcaacgtcttcgacatccaattttgccagtgcggcggaaatgcgttcgctcagaccgttgtgtgcgaggaatgcgcggtaggcttcggccgtggtggcaaagccgccggggacgcgaacgcctttttcggtcagctgactgatcatttcgcccagcgaggcgtttttaccgcccacgcgttcaacatctgtcatacgcaggttttcaaaccagattacgtagttgtcggccatttgtgtgtccaatccaaaatatgttaaaaaagaaacaaatccgcgtgcttattttaagcgattcgttcctctgctgtcatgtgttttatccgttttaaaatcatgatgccgtctgaaaaattgcggtttcggcgtgtgtagcggtttgaaacttacagccggtatacttctttttttgggtattttctttgtaaaacaggtggtttgaataggttaatgttttttctgtttgatttttttgtttattttttaaaattttctgccaaaaaatactttatataaataattttatttcaaaattatattgtgtctgtttgggtgtaatccgaggtaggtgtgctgcgggtgctttccttgtgtctgctgctgctgttatgatgggattttaaacctgtgttttaaggatggaagatgagcagtccgcgccatgtgttttacatttccgaccgtaccggtctgactgctgagaatatcggcgaggcgttgctgaaccagtttggcaatctgtcgttcaaacgccatacgcatccgtttgtcgatacgccggaaaaggcgcgcgcggtggtggagaaggtcaatcggagccggcaggaaaacggtcagcgtccgattgcgtttgtcagtgtggttgatgacgaaatccgtcggattatcaaaggggcggatgcttttcagattaatttctttgagacttttttgggactgttggagaaggaactcaataccgaagccacggcatccgggcaggggcatcacagtatcggtaatacgaagcgttatgatgcgcgtatggaagcggtcaatttttctttgaaccacgacgacggggtcagcgataagaaccttcaggaagcggatgtaatcttgatgggtgtatcgcgttcgggcaaaacgccgacctgcctttacctcgccctgcaatacggcatccgtgcggcaaactatccgctgattcccgacgatttggaatcggccgatctgccgcgtatggtcaagccttatagggataagctgttcgggttgaccatccagccggaacgtttgcaggccatccgccaagagcgccgcccgaattcaacttatgccaaaatcgatacatgccgcagcgaggtggcggacgcgcagagtatgttcagacggcatgggattccgtttgcgaatacgacggataagtcggttgaggaattggcggtacacatccttcaggcgtgcaagctcaaacgcaggttttgacgggctttgattcggtttgaaggcggaactgccgtctgaaatcaggtttcagacggcagttttatagtggattaacaaaaatcaggacaaggcgacgaagccgcagacagtacaaatagtacggagccgattcacttggtgcttcagcaccttagagaatcgttctctttgagctaaggcgaggcaacgccgtactggtttttgttaatccactatatgtttgtggggcggatatttttcagggctgtattttgtccagacattcgagcagatcgagtggcgtgcggatgtggaaatccgcctgccatgagccggtatcgtcttcgggagcgatgtagccccattcggcgaggacggtcgtcataccggcgttgcgccccgcctgtatatcgcgttccgcgtcgccgacgtagagtgtgtgttgcgggtcggcgtggatttgtccgcacgcatacagcatgggtttgacgctgggcttgggctcgccgcaggtgtcgccgctgacgacgacggcgggtgggatgatgaagccgagtttggggacgagtttgtcggtgaagcgcatgggtttgttggtgatgatgccccatttgatgccgcgttttccgagttcggcgatgagttcgtttacgccgtcgaagagggtggtgtcttgggcgtagcggctgtcgtattcgtcaaggtattcggtgcgccatcgggcatagtcgggatggtcgggggtgatgcctgcgccgagcttgatcagtcctgccgcgccgtggctggcttgggtgcggatttcgtccatgctttttgcaggtagtccgtggcgggcgagcagggtgttgagtgcgccgccgaggtctagggcggtgtcggcgagcgtgccatcgaggtcgaacaatacggcttgtatcatgtgtgttccttttttataaagtgcgggacgaagggtttcagacggcatgtttattttgtttcaaaccctgctcgaaatcttccaacatatccaattcaaagcggctgaagcctgctttttcgcgcgcttcgatgttcacatagccccggaagataaacatatcgtaacgggcaatcaggctgcggaacagggcgacaggctccaaaccgcgttcgcggcaaaggtgttgataccaccggttgccgatggcgacgtgtcccacttcgtcgcggtaaatgatgtccaacacgccgcaggtttccgaatcaccgcgctgcgccaccttcgcgcgtatgccgggcgtaacgtccagcccgcgcgcttccaaaacgcgcggcactaaagccatacgcaacaaaggatcgtaggcggttttgtatgccatatcccataaatgattgtgtgcttcaaaatcgccgtaatcgaagccgaaagcgcgcagcctttcgcgcatcaggcggaaatggtacacctcttccttcgccactttcacccagtcgcggacaaactgaaacggcagcgtgcggaaacggtatgccgcgtccaaagccagattgatggcgttgaattcgatatgcgcaatcgcgtgcagcatcgccgcatagccttcggttgtgttcattttgcgtggcgtcagctgcgacggcgcgaccaaaacaggcttgtccggtcgtcccgcgcgggggaagtccgccggcggtgcgtttgtttccgccccgtccgcattttgaacggcggcaaacgcctcatccgtcagccgtcctttttcatctgggtcgcccgaaagcagggcgcgttccagcaaagcataaatatcgggtttcatctcaagtccgccgtgttcggaaaacaaatattatagcgtttaaaaaaaacaagatgaggcatataatctccgcgattcggcattccgcgcccaaaccgtcaaatatagtggattaacaaaaaccagtacggtgttgcctcgccttagctcaaagagaacgattctctaaggtgctgaagcaccaagtgaatcggctccgtactatttgtactgtctgcggcttcgtcgccttgtcctgatttttgttaatccactataacgcggcacacattaaagggcagcgtggcgcgccgccttttccggtgggcaaaaaatcagccctcggaaaacgcggtttgcaaaatgcaaaccgcccgtaacgccgcccgtatgattgttttgctgcgccgatactttacgccacactcatcccgacaaggaaaaataatgatgaaaccgcacaacctgttccaattcctcgccgtttgctccctgaccgtcgccgtcgcttccgcacaggcgggcgcggtagacgcgcttaagcaattcaacaacgatgccgacggtatcagcggcagcttcacccaaaccgtccaaagcaaaaagaaaacccaaaccgcgcacggcacgttcaaaatcctgcgaccgggccttttcaaatgggaatacaccaaaccttacaggcaaaccatcgtcggcgacggtcaaaccgtttggctctacgatgttgatctggcacaagtgaccaagtcgtcccaagaccaggccataggcggcagccccgccgccatcctgtcgaacaaaaccgccctcgaaagcagctacacgctgaaagaggacggttcgtccaacggcatcgattatgtgctggcaacgcccaaacgcaacaacgccggctaccaatacatccgcatcggcttcaaaggcggcaacctcgccgccatgcagcttaaagacagcttcggcaaccaaacctccatcagtttcggcggtttgaataccaatccccaactctcgcgcggcgcgttcaagtttaccccgcccaaaggcgtggacgtgttgagcaactgatgccgtccgccccgatgccgtctgaaagccgccgaggcttcagacggcatttttacgcaggcggaacaatgtcccgcattaccgcccgatcgggcaccggaacggcaaaccggtgaaaattaacggttgcgccccggctgtttttgccgtttaatgcaaaccttgctgcaccaagggccaagaaagccgaccggccgcccccacagcttccgatgcaggcggcccgtccgtccctgcaatgttttttatttttgaacgaaaggtcgaaaaccatgaaaaaaacactggtggcggcggcaatcctgagcctcgccttgactgcgtgcggcggcggaagcgataccgccgcccaaaccccctccgccaagcccgaagccgaacaatcgggcaaactcaacatctacaactggtcggattatgtcgatcccgaaaccgttgccgcctttgaaaaagaaaccggcatcaagacgcgttccgattattacgacagcaacgaaacactggaggcaaaagtcctgaccggcaaatccggctacgacctgaccgcgccgtccatcgccaacgtcggccggcaaatcaaagcgggcgcgtatcagaaaatcgacaaggcgcaaatcccccattacggcaacatcgataaagatttgctgaaaatgatggaagccgtcgatccgggcaacgaatacgccgtcccctatttctggggcatcaataccttggcaatcaatacccagcaggtgaaaaaagcattgggtacggacaagctgcccgaaaacgaatgggatttggtgttcaaacccgaatacaccgccaaactcaaatcctgcggcatcagctatttcgacagcgcaatcgaacagattcccttggcgttgcactatttgggcaaagaccccaacagtgagaatcccgaagacatcaaagccgccgtcgatatgatgaaagccgtccggggcgacgtgaaacgcttcagctcttccggctatatcgacgatatggcggcgggcaacctgtgtgccgccatcggttacggcggcgatttgaacattgccaaaacccgtgccgaagaagccgcaaacggcgtggaaatcaaagtattgaccccgaaaaccggcgtgggcgtgtgggtggattcctttatgattccgcgcgacgcgcaaaacgttgccaatgcccaccgctatatcgactacacgctccggcccgaggtggcggcgaaaaacggcagcttcgttacctacgcgcccgccagccgtcccgcgcgcgagctgatggatgaaaaatacacctccgacgcatcgattttcccgaacaaagaactgatggaaaaaagtttcatcgtatcgcccaaatccgcagaatccgtcaaactgggcgtgaagctgtggcaagggctcaaagcgggcaaataaccggaatccctgccgtctgaaacctttcgggcggcaggaaacggcgcgtccgttatcaaacaggggggcgtttcccctcctgccggttatgattgggttaagattaaaatgatttagtaaaatgagaaagatatggatttaagtatcgtagttcctatttataatgtcgaaagttatttggaagcgtgtttaagttccatagaatctatattaagtaatgaaaatgtcgaacttatccttgtgaatgacgggtcaaaagacggaagtgaagatatatgttacaaatatatagataaaatatcaaacagcaaacaacaaacaacaaacaacaaacaacaaacaacaaacaacaaacaacaaacaacaaacaacaaacaacaaacaacaaacaacaaacaacaaacaacaaacaacaaacaacaaacaacaaacaacaaacaacaaacaacaaacaacaaacaacaaacaacaaacaacaaacaacaaacaacaaacaacaaacaacaaacaacaaacaacaaacaacaaacaacaaacaacaaacaacaaacaccggacaccaaatatcaaatatatatatcaggataaccaagggttgtcggaggcgagaaataccggaataaaaaattcaaacggaaaatatatagtctttattgattcggatgattttattaactgtcagattttgctggattttcttagtaaagatgatactgatatgccggatgtggtgtttttaaatgcggttaaatatgataagggaagtgtttcatattttggcgaagattatcagcctgaaaaaatactcaatcaatccaaagtcgaagttttgaaaggattatgccgatttagaaaatttccgggttcggcgtggaataagattataaaaagagaattgattattagagaaaaactgttttttgaaaggggaatttattctgaagatatcgaatggtcaatgaggttatttaatgcggcaacaactttttcttatttggacggttgttattactattatcggcagggaagaaaagattctattacgggaactgtttcggaaaaaagtataaagtcattattatatattttggagaaaaatgcggaaatggaatttaatagggatatatcgagttatctttattcttttctttcctacgaatatctcgttttgctttttataatgacgagtaaaaatatagagtgtgatgctgatataaaaagaagggcgtatcatttaaggtttatgctgttaaagtccaataaattgatatataagctgatattcccgataatcacattactcggggtcgatattacaggcaggattttaaaagcaatcagggggaatatttaataaatcctttaacaatatataccttaccgaaggaggaaaaatgaacgcaatccgaactttccaaaaccgcacgcccgaaatccacgaaacctgtatgatagacgaagcctgcgtcgtcattggcgaagtgtcgcttgccgaagatgtttccgtgtggccgtgcgccgtgttgcgcggcgatgtgaacagcatcaccgtcggcgcgcgcagcaatatacaggacggcagcgtcttgcacgtttcccacaaaaccgccgccaaacccgaaggatcgccgctggttatcggcgaagacgttaccgtggggcacaaagtgatgctgcacggctgccgtatcggcaaccgcgtcctggtcggcatggggacgacggttctggacgatgccgtgattgaggacgaagtgatgatcggcgcgggcagcctcgttccgccgcgcaaacgcttggcgggcggctatctttatgtcggttcgccggtcagacaggtgcgcgtgctgaccgatgaggaaaaagcctttttgaaatattccgccgcgcattatgtgaagctgtcgaaacagtacgggatgtgaaatcacatcggcgttcttgcgtcagccccaaattcatgcggatgggacgcatccgataacggtatccgatgcgccttgattttgaccgtctgcgtttgaattgcaggcaaaaatgccgtctgaaagccttttttcgggttcagacggcattttattgccgattgttttttaaagtttgaccgaatgttcgcgcgtttcgtggaacacgatgtccggccagcgttcttgcgtcagccctaaattcatgaggacgggatgcccgataacggtatccgatgcgtcttgattttgatcggtgcatttgagttgcaggcaaaaatgccgtctgaaagccttttttcgggttcagacggcattttatcgccgattgctttttacagtttgaccgaatgttcgcgtgtttcgtggaacacgatgtccggccaacgttcttgcgtgagtcccaaattcacgcggttgggggcgaggtaggcgaggttgccgcctgcgtcgatggcgaggttgcccgcgttggctttttcaaattcagccagttttttcttgtcgtcgcacgatacccagcgcgccgaccagatggatgcgctgtcgaacacggcttctacgccgtattcgttggcgaggcgcgaggtaacgacttcaaactgcaacacgccgaccgcgcccaaaatcaaatccgcgccgctcatcggtttgaacacctgcaccgcgccttcttcgccgagctgttgcaagcctttttgcagttgtttgattttcagcgggtttttgatgcgtacgctgcggaacagttcgggtgcgaagaatgggatgccggtgaacgccagttgttcgccttcggagaagctgtcgccgatttggatgttgccgtggttcgggatgccgataatgtcgccggcgtaggcttcttcaaccagctcgcggtcgtgcgacatgaaggtaaccacgctggaggcggcgatttcgcggttgatacgcaggtgtttcatcttcatgccgcgctcgaatttgccggagcagacgcgcaagaaggcaatacggtcgcggtgtttcgggtccatattggcttggattttgaagataaatccggaaaacttcggctcgtccggctcgaccatacgtacggtcgcgtcgcgcggtttcggcgcgggcgcccagtcaatcaatgaattgaggatttcctgaataccgaagttgttaatcgcagagccgaagaatacgggcgtgagttcgccggcgaggaattcgtcgagattaaactcgttggaagccgcctgcaccaattcgatttcgtcgcgcaactgctggatttccaacggaaagcgttgttccaattcaggattatcgatgcctttgatgatgtcgaactcgtgcggcaggcgttcgccgccagcttcaaagagataaatttcatcgttcaggatgtggtacacgcccttgaagtttttgcccataccgatcggccaggtaacgggcgcgcagcggatttttaaaatgttttccacttcgtccaaaagttccagggaatcgcgcacttcgcggtcgtatttgttcataaacgtaacaatcggtgtatcgcgcaggcggcagacgtttaagagcttgatggtttgcgcttccacgccttttgccgcgtcgatgaccattaatgcgctgtccacggcggttaaaacgcggtaggtgtcttcggagaagtcttggtgtcccggcgtgtccaagaggttgacggtgtggtctttgtaatcgaactgcatcacacttgatgccacggaaatgccgcgctgcttctcgatttccatccagtcggaagtggcgaatttgccggttttcttgccttttaccgtacccgcgctctgaatcgcgcccgaaaacagcaagagtttttcagtcaacgtggttttacctgcgtcagggtgggagatgatggcaaacgtgcggcggcggcgcacttggtcgaggatttcttgggacatggttttctttgcaaaaaggttcaggccgcttttcagacggcccggacagtgtttgagacggcgaaattgtacaaaaaaatgcctgataattcaatgttggaggcggtcagtgcgtgctgccgtaaatctctttttcgtctttcaggacggcatcggcggtttcccacgcgctgccacgccagactttgtaaaagcagctttctcgcccggtgtggcaggcgatgccgccgttttgggcgatgagcatcacaatggcgtcgccgtcgcagtcgaggcgcagtgcgcggactttttgcgtgtgtcccgactcttcgcccttcatccattgtttttggcgcgaacggctgtaatagtgggcaaagccggtttcgacggttttttgcagggcttcggcgttcatccacgccaccattaaaatacgtttggtttcggcatcttgggcgatggcgcaaaccaaacctttttcgtcaaatttgacggcttcaagcaggtttttatccatatttcctttcagacggcatagtcgaggcggtcagaggcgcacttcgatgccggcttcgcgcatagcgcgtttggcttcgcggatggcgatttccccgaaatggaaaatgccggcggcaagtacggcatcggctttgccttcggttatgccttcaatcaggtgccggacattgccgaccccgccggaggcgatgacggggatgtcgacggcttcggcaacggcgcgggtcagcggcaggttgaaaccctgtttcgtaccgtccctgtccataccggtgagcaggatttcgcccgcgccgcgtttttgcatttcgaccgcccattccaccgcatccaaaccggtcggatttcgcccgccgtgggtaaagatttcccagcgtgtgttttcggggttggcggctttggcatcgacggcggcgacgatggcttgcgaaccgaaaaatccggcggcttcgtcaattaaatcgggacgggtaacggcggcggtgttgatgctgactttgtccgcgccggcattgagcaggcggcggatgtcggcaacggtgcgtacgccgccgccgacggtcagggggatgaagacttgtccggcaacctcttcgatgatgtgcaggatggtgtcgcggttgtcggatgaggcggtgatgtcgaggaaggtcaattcgtccgcgccttcgccgttgtagcgtttggcggcttcgacggggtcgcccgcgtcgcgcaaaccgatgaagttcacgcctttgacgacgcgcccgtcttttacgtcgagacaggggatgatgcgttttgccagtgccataatcggatgcctttagtcgagggaatctgccagttgctgcgcttgggcaaaatcgatgctaccctcgtaaatcgcgcggccggtaatcgcgcctgctacgccatgtttttcggcggcacacagggcgcggatgtcgtccaagccggtcagtccgccggaggagatgacgggaatgcggacggtttgggcgagtttgaccgtcgcgtcgatgttcacgccgctcatcataccgtcgcgcccgatgtcggtgtagatgatgctgttgacgccgtcgtcttcaaagcgttttgccaaatcaattacatgatgcccggttacggttgcccagccgtcgatggcggccataccgtctttggcatccagcccgacaataatcctgccggggaaggctttgcacgcctcgcgcacgaagtcggggtttttgaccgccgccgtgccgataatcacgtcgtttaagcccaaatccaaatattgtccgatggttttcaaatcgcgtatgccgccgccgagctgtacggggatgtctttggcgacagcggcaaggatgtctttgatggcgggcaggttttgcggaacgccggcaaacgcgccgttcaaatctaccagatgcaggcggcgcgcgccttgtttgaaccagtgcagcgcggtttcggcgggcgaatcggaaaagacggtcgcctcttccatcagcccttgtttcaggcggacgcagcgtccttctttcaaatcgatggcgggtatcagcagcataatttttctccttgtgcggggccgtgtccggcttaccagtttaaaaagtttttcaacatcgtcagcccggcatcgtggcttttttcggtgtgaaattgcgtggcgaatacgttgtctttgccgacgatgcaggcaaacggggacgggtagtcgctttcgcccaatatggtttcgggattttcgggggcgaaatagtagctgtggacgaagtaaaaacgcgtgtcttggggaatatctttaaacagcgggtggttttgggtttggcgcacggtgttccagcccatatgcgggactttcagacggcatccctgcgggtcgcggaggtcgcgctcaaagcgtctgactttgccgccgaaccagcccaagccgtcggtgtttccttcttcactgtggtcgaataaaagttgcgcgccgacgcagattccgaaaaacggtttgttttttaaggcatctttgactgcctcgtccaaaccgtctcgttttaatgccgccatacagtcgggcatcgcgccctgaccgggaaaaatgactttgtcggcgcgggacacgcggtcggggtcgccgcttaaaaagatttcggtattttttccggcaagctgccccgccgtccggacggatttcaatacggaatgcaggttgcccataccgtaatcgataatggcggtttgcatggcttcctcctctttttttgcaatatggctgcgattttaacaaacaaatgtgccgtgctgataaaaatgccgtctgaaaacgggagtctgtcttcagacggcatagggtttaaacccggaaagccgtttgtcagccttccatttgttttgcctgaacggcagtcagggcgatggtaaacacgatatcttctaccagtgcgccgcgggagaggtcgttgaccggtttacgcaggccttgcagcagcgggccgacgcttaagacgttggcgttgcgttggacggctttataggtgcagttgccggtgttcaggtcggggaagaccaaaacggttgcctgtcctgccaccgggctgcccggagctttggatttgcccacacccggcacggttgccgcatcatattgcagcgggccgtcgatggcgaggtcggggcgtttttcccgggcaagtttggttgcttcgatgacggtatcgacatcggggccgctgccggagttgacggtggagtaggaaatcatcgccactttcgggtcgatgccgaaggcttttgcggaatcggcagactggatggcgatgtcggcaagctgttgcgcggtcgggttcggattaaccgcgcagtcgccgaagacgaggacttggttgggcagcagcataaagaatacgctggacacgaggcttgcgcccggtgcggttttaatcagttgcaaagcggggcggatggtgttggcggtggtgtgaaccgcaccggataccaaaccgtccacatcattttgcgccatcatcatcgtaccgagtaccacggtgtcttgcagttgcttgcgcgcgtcttcgggtgtcaggcctttggatttgcgcagttcgcacatcggctcgacgtattgttcgaccaatgaggcgggatcgatgatttccaaagagtcgggcaggctgatgccgcgttctttggcaacggcttcgacttcttcgcgtttggcaagcaggacgcagcgggcaatgcctttttcgtggcagatggcggcggcttggacggtgcggggttctgcgccctcaggcaggacgatgcgtttgtcggcttggcgggcgaagtcgatcaggttgtagcggaattgcgccggcgacaggcgttttgcttcgcggcctgccaatacggatacgtctttcagcgcgtcgctcgaaccgaagaaggtcaggccggttttttcggctgccgcttcggcaacggaggctgccgcgccgtccacgacaaaaccttccaatacgcccggcgcggcggcgaagaactgtttggcaaggttcacccgatttgccagttcgtcggcatcggcgttgtcggaacggacggcgaagacggctgccgcgtcaagggacaatgccagttcgacgtttttgcctgcgaggtagattttgtcggcatcgggcgcgatgccttcgatgacgaggttggcggcatcgagtgcggcaactttgccgaccagtgcgtcgaaccagtcgtcgcttttgccttgcgcgagcagggtttcggcggttgcgtcaacggcttggaaaatttgtgcgtccagtgcttttgcaaaggcttgtgcggcggcggaggcgtccagtccggcagatacgggtacgatgagtacttttgccatgatatatcctttcgtatgctgcggtgtgcggcatatgtggttggaaggggcggcatataggcagaaacggctgcctgcgtgccgtgcgtgccgtgtttggcttgaggcgcgcaggttgaatatagcaaacaaattctgtttccaacaagataaatatccgcaggcttgtggatgctgccgcctttcagagggtatttccggggaagaacagggcgggaccgtccaaatggaggacggcggaaatgccgtctgacagggtgggggcggaagggaggttgagcgtgaggacggtttgtccgacccggaggctgatttcggtatgccgcgctttgggcgtggttttgagaaccacggcgtgaatggaggcggtgggtgcggaatgggggtgaaggctgaactgttccggacggatgagcagtgtgccgcgtgtgcctgcgggtgcgccgctttgaacgggcaggcggcccaatccgcaatcggcggtgccgtcggcgttgagcgcggcggggaacacgatgccttcgccgataaacagggcggcatcaaggtcggcaggttgtcggtacaattcgtgagggcttgcagtttggaggatgcgcccctgtttcatcacggcaatccggtcggcgtattgcagggcttcttcgcggtcgtggctgacgaaaacggcagatttgccgttggcgcgcagggcggcaatcatgtcttcgcgaatctggcggcgcaactgttcgtccagcgcgctgaagggttcgtccaacaaaatcagttcgggatcgggtgcgagggcgcgggcgagggcgacgcgctgttgctgtccgcccgaaagttcgtgcggatagcgtccggcaagttcggaaatgccggtcaattccaacatagcttcgatgcgctgccgctcttgcgccgtcttgcctttgccgttgcccagcccgtaggcggtgttgcggtaaacggtcaggtgggggaacagcacaccttcctgtacgacataacccaaacggcgttcgcggacggggaggttggtatttttcgagaagatggttctgccggaaagcgaaatttcgccaaaatcgggttgttcaaaaccggcaaggcagcgtaaaagggtggttttgccgcagccggacgcgccgacgataaagaggatttcgcccgggtcgaggctgagcgaaatgtcgtttaaaactggggtgttttgaaaacttttggacaggtgtccgatgtgcagggcggcggtcatggcggtacttcctcaagctgttatttgaaggcgtatttcttcagcaggaatacggggatgccggaaaataataccagcatcagcgcgtaaggggtggcggcggcgtattgtgcgtccgatgtgtattcccaaacggcggtggagagtgtgtggacatcgtcggtggtcagcagcagggtggcggtcagctctttcatcagtttgaggaagacgagtgcgaatgcggcggtaatgccgggcaggatggacggcagtaccaacgtcctgaaaataaagaagtgtccgcgccccaatgttgcgccgacctgttccatcccttttgggagttgttccaaggaagtcctcagggtggtttgcgccatcggcaggtaaagcatgaaataggcaaggatgacgacgataaaggtttggtaaacggcaggggtgtagttgatgctgaaataaaccaaggatagggcgataaccaaaccggggacggcgtgcagtaaaaacggcagcctgtctatccaaacggttaaaaaattgcgatagcgaaccgatgcccaaacaaggggcaaggcacataatatagtcaaaatcgcacctaaagccgatacgcttaaggaacggataaaggcatcaaatacggatacgagcgcgaatgtgccggaagtgccgaccatcatccaatgtatcaatacgccaaaggggataataatgcccaaagtcaacaagctgcttaaaaaaacaatcgcgccaatctgaccgggcagtttgagggttttgacgggataaggacgggcaacgcctttgccgctgtggtaaatcttggctttgccgcgaaatatgctttctccaaatacgacgatgccgcacaccgccattaaaacagcggaaagcagggcggcggtattgttgttgtaggacatttcgtattcttggaaaatggcggtggtaaaagtggggtagttcaaaatggataccgcgccaaattcgaccagcatatgcagggcaatcagtaacacgctgctgccgatggcgggtttgagctgggggaggatggcggaaaaaaaggtttgcaggcggcttttgcccaaggacaggctgacttcttcgtaagacaggctgatgcgtttgagtgccgcctcgacgggcaggtaggcgagcgggaacgaggacaggctcataatcatcactgtcccccaaaagccttcgacacggaaggtcaggctgatccaggtgaaacagctgacaaatgcggggatgcacaaaggcagggtgattgccgtctgaaaaaaggttttgccgaagaagcggtaacgttggaacaaaagggcgcaggcaatgcccaaaacaatggaaatcagggtaacgcccgccatcatcgtcaaggtgttggagagcaaatcccacatacgcgggcggaacaacagttcgacggcgcggttgatgccgacctgccacgaacgcatagcgacatataaaaaaggcagggtaagcggtagggcaatcagtaggatgaggccggtaagccaaatgggtatttttttaggagacatagtgttttttatcggcaaaacgggcggacagtataaatgtccacccgtttgacaatccgaaaacggcttatttcataccggcttgctcaagcagccgggtggcgtgttctttttcggaaacagtggtggcggacacttggggtgcttccaacttggcgatgggttccaaattgaaagtggataccacgtgcggattcaaaggatattcggcacggacggcggtcagggcgcgctgtccttccttgctggcgaggaaggcgacgaattttttcgcctcatccttgttttgggaggattttaacacggctgcgccggaataggtaacgagtgcgccgggatctctgtggcggacgaaattcaggcgggtgtggacattttgtacgcctttttcacgcgcaaaagcgtgccagtagtagttgttgatgagggcggcatcgatttcgccgttttcaaccgcttgaagggcgacggagtttttagcgtaaggcttgccgtattctttcagacctttgagccatttcaatgcggccgcttcgcctttcagtttgacgatggcgacaacctgttccaagaacgcgccggaagtgggggcgtaaccgatgcggtttttccatttcggcgtggcgtaattcaggacggatttttccaaatctttttcagacagtttgcgggtgtcgtaaacgacgacgcgcgaacgtccgctcagtgccacccagtcttttttggcggcaaccggcacgcccttgccgcgtgtttcgttgatggtggaggcgggcaggggctctaggaggttggcggcggaaagggtggcgagtgccgggatttgttcggaatagaatacgtcggcggggcttcggctgccttcttctttgatttgaccggcaagctggtcgcctttggcgctgttgagtttgactttgatgccggtagcccgggtaaaggcatctgcaacggcttgtgctgcttctttgtgttggccgttgtacacggtaatgtctgccagcgcgggggttgcggcggtcagggctgcggcaagcagtgcgtatcggatagatgttttcatatcgattttctcctaatgaatgagagtgtataccttgttaagacataacggtgtgtagtgtattccttcttttttataaatgcaaataattattttttaaatttgttgttgtccgatccggttattgtttgttctgacttgtattttttccgtgagtctcgcccgtaaggcggaagtggcgggcaatgcgtggcggaatgtgggtaaaggcggcattttgatttgtcggaatgcttgagaacccctctctttaaaacacccttggattcggatttcaagtgcaacactagtgtattagtggttggaacagattcaagaataaaacacttggcgtttcgtagccaagtgtttttcttggtcggtggttcaactcatcttgaaccctgcgtatctcccgatcactgatgttacggaaatcggtttgtttggggaagtattgccggatgagtccgttggtgttctcattcagccctttctcccaagaatggtaaggacgacaaaaataagtctccgctttcaatgctttggttattttggtgtgttggtagaactctttgccgttatccatggtaatggtgtgcaccctgtctttatgtgcctttaatgccctaacagctgcccgggcagtgtcttcggctttgaggctatccaatttgcagatgatggtgtagcgggtaacgcgttcgaccaaggtcaataatgcgcttttctgtcctttgccgacaatggtgtcggcttcccaatcgccgatacgggatttctggtcgacgatagcgggtcggttttctatgccgacacggttgggtactttgcctctggtccatgtgctgccgtagcgtttgcggtagggtttgctgcatattctgagatgttgccacaacgtgctgccgttgcttttgtcttggcgaaggtagcggtaaatggtgctgtggtggagcgtgatctggtggtgtttgcacaggtaggcgcatacttgttcgggactgagtttgcggcggataagggggtcgatgtgctgaatcagctgcgaatcgagcttatagggttgtcgcttacgctgtttgatagtccggctttgccgctgggctttttcggcgctgtattgctgcccttgggtgcggtgccgtctgatttcgcggctgatggtgcttttgtggcggttcagctgtttggcgatttcggtgacggtgcagtggcgggacaggtattggatgtggtatcgttcgccttgggtcagttgcgtgtagctcatggcaatctttcttgcaggaaaggccgtatgctaccgcatactggcctttttctgttagggaaagttgcacttcaaatgcgaatccgccaccgtctgaacagggttgctggaatagtattgccatcccagcagatacagtttgtcggggtcttgccaatattgttcatccagactgttcagcagtgaggcggttttgttgtcgagatgttatatcccacatttctttcaggtttttaccttccgattggaggcggcggatttctttgtccaatgcgtctgccgcccgatggatcagcattgcgctgtgtaccgcgccgatttttttcagaacggaacaagtcttttcggcggcggggaaaccccagttgcagacaaattgcagtatgctgccgttaccgatatcggcttctgtccgccaaatcaaaaccagctcctgttcccgcccgtccatgctttcgagtttgccgtcatgctgttcaaaaagtttgtccaccgcctgccacatcatctgttcgaagcggtcggcttgggtatccgtatcggtcatcgtgttcttgccttttaaaaatgccgtctgaacatttcttcagacggcatttgggggttaagccaacatttcccgccagcgtttcacttggaagcggacttgttccggcgcggtaccgcccaagtggttgcgggcgtttaagctgccttcgggtgtcagcacgccgtaaacgtcgtcggcaatcaaatcgctgaaaccttgtaagacttcgagcggcagttcgctcaaatcgacgcccgcttggtcggcgtggcgcacggcttgggcgacgacttcgtgggcatcgcggaaaggcatgccttttttgaccagataatccgccaagtcggtggcggtagcgaagccctgcatcacggcggcgcgcatattgtcgggtttgacggttacgccgcgcatcatatcggcgtaaatccgcaacgtgtcgataagcgtgtcggcggtgtcgaacaagggttctttgtcttcctgattgtctttgttgtacgccaagggttgggatttcatcagggtaatcagaccgataaggtgtccgatgacgcggccggatttgccgcgcacgagttcgggcacgtcggggtttttcttctgcggcatgatggacgaacctgtgcagaaacggtcggcgatgtcgataaagccgaaacgcgggctcatccacaaaatcaattcttcagacaggcggctcaggtgaaccataaccagcgaggcggcggctgtgaactcaatggcgaaatcgcggtcggatacggcatcgagcgagttctggcagatttgttcaaagcccaatagctcggcggtgatttcgcgctgaatcgggtaggtcgtcccggcaagggcggctgcgccgagcggcatacggttgacgcggcagcggcagtccgccatccgttcgttatcgcgtccgagcatttcgacgtaggcgagcatatggtgtccgaagctgacgggctgggcgacttgcaggtgggtaaagcctggcatgacggtttcggcgttttgttccgccaaatccagcaatgccgtctgaaggctttgaatcaggctttgtataacggtaatctggtcgcgcagccacaggcggatgtcggtggcgacttggtcgttgcggctgcggccggtgtgcaggcgtttgcccgcgtcgccgattttgtcggtcaggcggcgttcgatgttcatatggacatcttccaaatcggacgaccattcgattttgccgctgcggatttcttcgaggatttccgccataccccggcggatgtccgccaaatcgccttcgtccaacacgccggtttctttcagcatttgcgcgtgtgccagcgagccttggatgtcccattcggcaagccgtcggtcgaaaccgatggaggcggtgtattgtttgacgagttcggaaacgggttcgttgaaacgtccggaccaggttttgtcgtgcataaggattccttgatggggttattcggtgcggtatttttccaaaagccggcggaagggttcgccggtttcgggatgtttcagaccgtaggcgacggtggcttcgaggtagcccagtttgctgccgcagtcgtagcgcgtaccttcaaaggggtgcgccaggacaaattcgtgatcgagcagcttggcgatgccgtctgtaagctggatttcgttgcccgcgccgcgcggaagattggttaagaggtcgaaaatgcgcggggtgaggatgtagcgtccaacaacggcaaggttggagggcgcgtcttcgggcttgggtttttcgacaatgccggtaatgcgttggaactgtttgagctgttcggtttcgacgatgccgtatgagccggtttgcgatgcttcaacggtttctacgcccaaaatgctgttgccgctgcgcccgtacacttcgaccatttgtttgagcgcgcctttgggggcatcaatcaggtcgtcggcaaggataacggcaaagggttcgtctccgatggcggcgcgggcgcacaagacggcgtgtcccaagcccagtgcttccgcctgacggatgtagaggcaggtaatgttcggcggcaggatgttgcggacgtgttccaacaatttgtctttatggcgcatttccaactcggtttcgagttcgtatgccttgtcgaaatggtcttcgatgctgcgtttgttgcgtccggtaacaaacaccatttccgtgcagccggcttccacggcttcttctacggcgtattggatcagcggcttgtcgacgatgggcagcatttctttcgggctggccttggtggcgggcaggaagcgggttcccatccctgcgacggggaaaacggctttccgtatgggtttcattctttttcctttgtattgttttgatgtttaaagggcgagtttgcgtaagagttcggcaagtgcctgcgcgcggtggctttcgcggtttttgacctccgtatccaattcggcggcggttttgccgtgttcgggcagataaaaatacgggtcgtaaccgaaaccgttttgcccgagcggcgtgtcgttccactgcccgtgccatacgccctcggcgataatcgggcgcgggtcgtctttatggcggacaaaaaccaatacgcagacatagcagcagcttttgtctgccttgccgacaagttcggcggcaagtttcaggttgttggcggtatcggatttgggattgtcgcccgcgtaacgtgcggaatggatgcccggcgcgccgtttaaggcggcggcacagatgccgctgtcgtcggcgagtgcgggcagcccgctgtatttggcggcatggcgtgcttttgccagcgcgttttcgacaaaggtgggatagggttcggggcattcgggtatgccgaatgcggattgcggcaatacggtgatgctgtaaggtttgaataagttgccgaactcttcgagcttgccggcattgccgcttgccaaaacgattttttccggtttttcagacatagcggttttcctttgtggcggattgggcggcgcgtagggatttgtgccgcaggtagagggcgaggctgccgatttgtccgaacagtgcgccgaatgcgaaaagaaaggaggcgacggcgaaggctttgctgccgacggtcagcagataagcacccaagaggacgagcagcataaatgccagtgtgaagagggcaacagacaacagatagatttttcggcggttcatggcgttcggtcggaaacggtatgttcggattatagccgattgggacggtattccctagagcttggaaaaatgccgtctgaaacggcgttcagacggcatggcgggcgttatgcctgtttgttccaacgttcgatggattctttgatgacttttttcgcttcttccgcatcgccccacgattcgactttggtcgtacctgcttttttcaggtctttgtaatggttgaagtggaactcgatttgtttgatgagctgttgcggcaaatcggacaaagttttgtaggcgttgccgttgttgcggtcgtcggcaggaacgcagacgattttgtcgtccacttcgccgtcgtcaacgaatttcatcacgccgataacgcgcgcttccaagaatacgccggttgccaaaggttgttcggtaacgagcagcacgtccaattcgtcgccgtcttcgtccaaagtttggggaatgaagccgtagttggtcggtttggcgaagatggcgggttcgacgcggtcgagttggaatgcggccagtttgcggttccattcgattttgtggttgctgccggcggggatttcgttgacaacgttgatgatgccgccgtccacgtcgccgggggtcaggatttggttgaagtctgccatttggtttcctttgtttgggaaagtgtgaagtttgaaagtatagcacaaacgtccggctgaaaatgcgcccgatgcctctgaaagggtgtacgggcgcgtgttaccgtttgcccaaaaacctgcccagttccaaaatcgcgcgcctgttggacggggaaaatactttttccgctgcttcttccatatcgaaccaaccgtaggagacgtgttcttcgggttgcagggcgatgggcgtatcacgcgggatttcggcagagaagaggtgttcgcggttttcaaacacgccttttggatagcggtgccgccagtggtggtagatttcgtaaaccgtgctgtcgtgccagtcttgaagctgcccgtccgccagcaggatgccggtttcttcccaaacttcgcgccttgccgtttgggcgacggtttcgcccggttcgaggctgccggttaccgactgccaaaatccttccggatgcgtgcgttcgatgagcaggatgccgccgtccccgctataaaggacgaccagtgcggaaacggggtatttgagcggttttgccatcggcatctttcggcgggctgcggtaatgaaggggcggattatagcaaacgccgcacgttatggcgtttatccttttccgtatccttttttctgcacggatgggacgcgccggtgtttgccggtaaattttccgttgtgtcaaaaagataagggcggttgtgattttaatgcttgccaaagcgtcgggcggaaactataatccgaaacttatcgagtcggagtgtggcgcagtctggtagcgcacttgcatggggtgcaaggggtcgaaggttcgaatcctttcactccgaccaaaaattccgaaagccgctttcaaaagcggcttttttgccgtccgtatgattatgatgtagagtacgcggcgacagacattcaaatgccgtctgaaaaccgttcagatggcatctctttatcttagtttcattccgtaccatcttaaggaacatcaaattgggcatttcccgcaaaatatcccttattctgtccatactggcagtgtgcctgccgatgcatgcacacgcctcagatttggcaaacgattcttttatccggcaggttctcgaccgtcagcatttcgaacccgacgggaaataccacctattcggcagcaggggggaacttgccgagcgcagcggccatatcggattgggaaaaatacaaagccatcagttgggcaacctgatgattcaacaggcggccattaaaggaaatatcggctacattgtccgcttttccgatcacgggcacgaagtccattcccccttcgacaaccatgcctcacattccgattctgatgaagccggtagtcccgttgacggatttagcctttaccgcatccattgggacggatacgaacaccatcccgccgacggctatgacgggccacagggcggcggctatcccgctcccaaaggcgcgagggatatatacagctacgacataaaaggcgttgcccaaaatatccgcctcaacctgaccgacaaccgcagcaccggacaacggcttgccgaccgtttccacaatgccggtagtatgctgacgcaaggagtaggcgacggattcaaacgcgccacccgatacagccccgagctggacagatcgggcaatgccgccgaagccttcaacggcactgcagatatcgttaaaaacatcatcggcgcggcaggagaaattgtcggcgcaggcgatgccgtgcagggcataagcgaaggctcaaacattgctgtcatgcacggcttgggtctgctttccaccgaaaacaagatggcgcgcatcaacgatttggcagatatggcgcaactcaaagactatgccgcagcagccatccgcgattgggcagtccaaaaccccaatgccgcacaaggcatagaagccgtcagcaatatctttatggcagccatccccatcaaagggattggagctgttcggggaaaatacggcttgggcggcatcacggcacatcctatcaagcggtcgcagatgggcgcgatcgcattgccgaaagggaaatccgccgtcagcgacaattttgccgatgcggcatacgccaaatacccgtccccttaccattcccgaaatatccgttcaaacttggagcagcgttacggcaaagaaaacatcacctcctcaaccgtgccgccgtcaaacggcaaaaatgtcaaactggcagaccaacgccacccgaagacaggcgtaccgtttgacggtaaagggtttccgaattttgagaagcacgtgaaatatgatacgaagctcgatattcaagaattatcggggggcggtatacctaaggctaagcctgtgtttgatgcgaaaccgagatgggaggttgataggaagcttaataaattgacaactcgtgagcaggtggagaaaaatgttcaggaaataaggaacggtaatataaacagtaactttagccaacatgctcaactagagagggaaattaataaactaaaatctgccgatgaaattaattttgcagatggaatgggaaaatttaccgatagcatgaatgacaaggcttttagtaggcttgtgaaatcagttaaagagaatggcttcacaaatccagttgtggagtacgttgaaataaatggaaaagcatatatcgtaagaggaaataatrgggtttttgctgcagaataccttggcaggatacatgaattaaaatttaaaaaagttgactttcctgttcctaatactagttggaaaaatcctactgatgtcttgaatgaatcaggtaatgttaagagacctcgttataggagtaaataaaaatggcaatttggaattatcggtactaccttatcccatcagctgctatcagaaataaatttaatgcaaataaagatatcatacttgatgagtatcgatctaatggttttcagaattttaatgagaataaaagttttgaaaattactttatcgataatgatgttatattattatcaataataaatgaagcaaaaaaacagcttaaattgaaagaatcttgggataaagacgcaatcatgttttgtgataattttggtaatagtcttaccgtttggccagatgatatagagtgcgaacttgatttaagatttgattatactaaatttattcagaaaaccattgattgggcaataaaatataattgtctacttgtaatagaaaaaacaggaaatgtagtttcccctaatataaataatctgatgtatgaaataaaagcatatttggaaagcaagccgtggcccatatgaaacctaaactcaacaagtaggatgtgtgcggaacgcacgtatgcggttctcaaggtttgagctaagaggccgtctgaaaacagaaaaactgtttcagacgacctttcttttaaccagttgccacagcaaccggacaaaagcagcctacctccacatccatataggcaatacaggggagatattttgtaaattctacgaatattttacctgctaaacagggtaggatatggtatgaagcgaacattggcttaataaacactatgtcaagatcgaatcaggctggtactagattgttgtattccaattatggattgctatatataacaactgatcattatatctctgcaacacggtttgtagcttggaaataggagtataacttatgcaattagagattatcggtagtaaaatttatacggaacaagattttcataatcaaatttcaaaaatattttctatacaagattattatgggaacaatcttgatgctttatgggatttattaagcacaaatgtagaacgaccgattactttggtatggaaagatgctatgttctcaaaaaatcaattagaaaatatatttattgaaatcgtaaatgttctagaaagagttaagaaacaagatgaggattatggattcgaagaaaaatttaattatattttagagtaagtaaaccctaattacattacgtacacaggcttaaaactccccagagccaattaagcaagccgtaacccatataaaacttaaactcaacaagtagcatgtgtgcggaacgtacgcatgcggttcttaaagtttgagctaagaggccgtctaaaaacagaaaaaccgtttcagacggtctttgtttaacgccaccgatccagcgggttacaaagcgcagtcaatgccgctgcgccttatgcctccgaagcaataggcagaacatttggacacggtgaaaacaaaaacgaaaccgcccaagccgtcggacatttccttttaggagcagctattgcccgcgtcaacggtggtaattttgctgccggcggctcggcagcagttgcagctgaaaaggcggcggaacatcttgcccaacagtataacgacggtaaaaccgcaatcgatccgcaaacaggcgagttcaatgccaacctgctgccggaacatatcaaagaggaaatcaaatcaaagagcggggtgattgcatcgctgacgggcgcggccgtgggcggcacgccggtagatgcgcaaaccggaggtgcggtcggacagaatgcggtggaaaacaacctctatctgacatcggaagccttaaagaaggacaagcagacagctcgtaaaatttattccgtcataaaagagcaagtcaagcatgaatgcagttccacaggaagaattaccgaatgtcgtcaaaatataggacgcattatcgaatttacccaagacaaacgctttgacagtaggtttaaggacttaaaaaaagaatccttatattacctaaataaacatcctgatttagtagcctcttatttgaaggctgaatacgaaaagctggatagggaagacaaaagtatcctgcaccgctacatctcacccggggctgaaatcgtttcgggcagtttgggggttgttctttcaggagtagccggaggcggatcttgtgccgagactttcggcttaggctgtgccgccgctttggttggtgtaacgtcttcctacgatcatgtcattactgggacgaaaaacttcggaaaaaaagccagcgagcaacgaccgacgattgcggttcaggccttgaagcagttggggctgtcggagcaggctgcggaatatgttcagttctctatagatttgttcagtgtgggtaaatcggggggcggtatacctaaggctaagcctgtgtttgatgcgaaaccgagatgggaggttgataggaagcttaataaattgacaactcgtgagcaggtggagaaaaatgttcaggaaacgagaagaaggagtcagagtagtcagtttaaagcccatgcgcaacgagaatgggaaaataaaacagggttagattttaatcattttataggtggtgatatcaataagaaaggcacagtaacaggagggcatagtctaacccgtggtgatgtacgggtgatacaacaaacctcggcacctgataaacatggggtttatcaagcgacagtggaaattaaaaagcctgatggaagttgggaggtgaaaacgaaaaaaggtgggaaagtgatgaccaagcacaccatgttcccaaaagattgggatgaggctagaattagggctgaagttacttcggcttgggaaagtagaataatgcttaaggataataaatggcagggtacaagtaaatcgggtattaaaatagaaggatttaccgaacctaatagaacagcatatcccatttatgaatagtaatatttatgaaaaattaggagattaatgatgaaaagaattaagtgcttttgtgataaatttccatcaggagatacatttagaatgtgtatcattctggatgactatgataatagggttgattattatgtaggaatatatgattacattacgtctaccttaatgagcgatatttactatcgatccacgattgatgagcatttcaagattatagaattaatagaaaataatccaaatgaaatttatgatgatggcggtggtcaacaattttgcctagaatttcatcatgataaggtcattttttaccacaatgaatttgatgaagaagatggttatccagtattaagctgttcgctgcatacttttaaaactgctttaattgcttggaatgcttttttgcaattgcctaaaagtattcattcggtggtggagactgtgattgaggaataagcataattagcttaatgaatagaatcagcgatatagattggactgcaaatccacgcttatacgctgtgccatgattaagatgttagaacttgtattgaatacaagttctcataaacgaatggcagtaagcatttgatttagataaaatccttgaattagaataatcaggtctaagagctcgacaggacaaatgaggctggcaaccaaggatttggcggaagccattaggaaaggacaggttcgcaaatcaagctttaacacagaacaattaagggcaattgaaaaaggagaatctaaaataccggattacacttggcatcatcatcaagatacaggaaggatgcaattgattcgtgaaggcttgcatcatgataccggccatattggttgggaagcaatgaacaaaggaaggtaactatgtggaaaatcataaaagaggatagtgatgatttagaatttgcaattaaatgcttattctctcagtctattgatttaaatgaattcaagttatggattgaacaagtaatacgcgatatgcccatcgaggacatccctttttatatttttgatttggcggattttgatgggggaattgccgatattgacaatattgtaggttttgtttcaagttgcagactatcaaaatcgaaaaaaaatgccttgaccggcattgccttcttaagggggatagatgtctatgatccgcctatttcaaaagaaaaagcattaaaagccttagagaaacatcctgaaatttatcagaaatttcagcatttctttccgtttgtagaactgcccccgctttaaacagtcaaaatgccgtctgaaacgatattcggctttcagacggtatttttgatataaagcgggtaactaaaagagcgtttgacggcaaaggaagataattatgtggaaaatcataaaagaggatagtgatgatttaggatttgcaattaaatgcttattctctcagtctattgatttaaatgaattcaagttatggattgaacaagtaatacgcgatatgcccatcgaggacatccctttttatatttttgatttggcggattttgatgggggaattgccgatattgacaatattgtaggttttgtttcaagttgcagactatcaaaatcgaaaaaaaatgccttgaccggcattgccttcttaagggggatagatgtctatgatccgcctatttcaaaagaaaaagcattaaaagccttagagaaacatcctgaaatttatcagaaatttcagcatttctttccgtttgtagaactgcccccgctttaaacagtcaaaatgccgtctgaaagccatttccgccgctcagacggcattttcgccccttttgtttacaaacccttaaaatccctttacactcaaaatccgttcaacatcaaacaaaccccgctatgaaaaccctgctcctcctcatccccctcgtcctcacagcctgcggcacactgaccggcatacccgcccacggcggcggcaaacgctttgccgtcgaacaagaactcgtcgccgcatcgtcccgcgccgccgtcaaagaaatggatttgtccgccctaaaaggacgcaaagccgccctttacgtctccgttatgggcgaccaaggttcgggcaacataagcggcggacgctactctatcgacgcactgatacgcggcggctaccacaacaaccccgaaagtgccacccaatacagctaccccgcctacgacactaccgccaccaccaaatccgacgcgctctccagcgtaaccacttccacatcgcttttgaacgcccccgccgccgccctgacgaaaaacagcggacgcaaaggcgaacgctccgccggactgtccgtcaacggcacgggcgactaccgcaacgaaaccctgctcgccaacccccgcgacgtttccttcctgaccaacctcatccaaaccgtcttctacctgcgcggcatcgaagtcgtaccgcccgaatacgccgacaccgacgtattcgtaaccgtcgacgtattcggcaccgtccgcagccgtaccgaactgcacctctacaacgccgaaacccttaaagcccaaaccaagctcgaatatttcgccgttgaccgcgacagccggaaactgctgattacccctaaaaccgccgcctacgaatcccaataccaagaacaatacgccctttggaccggcccttacaaagtcagcaaaaccgtcaaagcctcagaccgcctgatggtcgatttctccgacattaccccctacggcgacacaaccgcccaaaaccgtcccgacttcaaacaaaacaacggtaaaaaacccgatgtcggcaacgaagtcatccgccgccgcaaaggaggataaaccgtgaaaccgctgcgcagactgacaaacctccttgccgcctgcgccgtagcggcggccgcactcatacagcccgccctcgcggcggacttggcgcaagacccgttcattaccgataacgcccaacggcagcactacgaacccggcggcaaataccacctcttcggcgacccgcgcggcagcgtttccgaccgcaccggcaaaatcaacgtcatccaagactatacccaccagatgggcaacctgctcatccaacaggcaaacatcaacggcacaatcggctaccacacccgcttttccggacacggacacgaagaacacgcccccttcgacaaccacgccgccgacagcgcgagcgaagaaaaaggcaacgttgacgaaggctttaccgtataccggctcaactgggaaggacacgaacatcatcccgccgatgcctacgacggcccgaagggcggcaattaccccaaacctacgggcgcacgagacgaatacacctatcacgtcaacggcacagcccgcagtatcaaactcaatccgaccgacacccgcagcatccggcaacgcatatccgacaattacagcaacctcggcagcaatttctccgaccgcgccgatgaagccaacagaaaaatgttcgagcacaatgccaagctcgaccgctggggcaacagcatggagtttatcaacggcgtcgccgccggcgcgctcaacccctttatcagcgcgggcgaagccgttgaccagtggatgcaggaaaaccccaatgccgccgaaaccgtcgaagccctggtcaacgtcctgccgtttgccaaagtcaaaaacctgacaaaggcggcaaaaccggggaaggctgcggttagtggggatttctcagactcctacaagcataacactgcttcaagattatctcagtctgtagatggagaaatgtttcaaacccgcaatgttgattttaaagcaaaatctattgggactaaaattcatgatggagctcaagggaaacatatttcaggacatagaaactacattgaaggtaagagtactttaaatcaaaacattaatcctcaagaattgttgaacggaatacattcaggtgcttatccagttatttctaaaggagcaagaggaaatcctgttgttgattttgggtatcctataggcagcgatgggaaatcaggattaagtaccaattttggtacgattcattcaggtaaaaatggagttcacattgttccggctaaccctaaaaccattaaaaaggtgcaatagttatgaatatattaccaagctggctgcgagtcggtatgaatatagcaatgctgggcatgatacactcagatatcaggttaattaccgtagattacgaggaaggaagaaggtttttaaaaatcaaaaattatttatcaagagaagccatcacagaagaccatgaagatatggaatatttgattacagagttatggtctatgtgtggagaatattttgatgaagctgactttgaatgtatttattctaatcattcttctatggagttaaaccaaataaatggtgcagtattcaggagaaaggaattaatttcgcaagcgtaggttaaaaaaaccaacaatcacaatgtcttctgaaaccgtgtttaattttcagacggcatttccttcatttgaaataggatattgagaactgagttcttcaaaaatcctacacctgctccttccacggcagcaccttggtcaaaacggcagacggctacaaagccattgcccgtatccgaaccggcgaccgcgtcttcgccaaggacgaggcaagcggaaaaacgggatacaaacccgttaccgcccgatacggcaatccgtatcaagaaaccgtttacattgaaatttcagacggcatcggcaacaaccaaaccctgatttccaataaaatccacccgttttacagtcaaggaaaatggatacaggcaggtcgtctgaaaaaaggcgacaccctgctttccgaaagcggcgcaaaacagacggttcaaaacattaccttcaaacagcagccgctcaaagcctacaatctgaccgtcgccgattggcatacctacttcgtcaagggcagtcaggcggaaacggaaggggtttgggttcataatgattgtccgtatgataaaggcaaccaacgatataaagacgcttcttatcatggcaaaaatgataattctgtgaaaagtagagcaccaacaaacggacaagcagctcttgataattccgttcaagttaaatcaacttctcctcgaagagttggggttgataaagccaataatgaaatcgttgtattaaacaaaactcaaacttttaataacggttctgcggaatatcacgggcatgtcagaagttggcaagatttgcataccgatcagaaaaatgctttaaaaaaagcaggattggattagttaattcaaaaggaaaaattaaaaaatgactgataaaagtaaaacagaaaagttgatttcttctgatgataaacaaagtgttatagatggcattcttgatatggtatttaattccaaagcatatgaagtaccgtggatttctgagaaattgatggaattatcgaaaaataaagacttggatattgccggattatcgctaacctgtttcggacatctcgccaggctacattcaaatatcggtgattacgataaagttattcctttactacattcaaagcaagatgatccagagcttcaaggtagggctgaagatgcgttagaagatatttctttatttttatctgaaaatcattaggaaccgtaggtcgggttgaaaacccaacaatcaaaatgccgtctgaaaccgtgtttaattttcagacggcatttctttcatttgaaataggatattgagaactgagttcttcaaaaatcctacacttgctccttccacggcagcaccttggtcaaaacggcagacggctgaaaagcaaacaccgtccgtcgtgttgccgtttgcggatgagtacgggtcaaccccaatgccgccgaaaccgtcgaagccgccttcaacattgccgccgccaaagccgcaaagttggcaaaaacggtaaaaccggggagataaaagccgatggcaggaaagtaaatgtgaggatagacagtacggaggcagacctgctttatccggcagggcaataagaaaacaaaaattagatatggaaaacgattgtgaagattaaaccattacaattttctaacaataatcacagattttatgtggacaaaatttgtgttaccgaacaagatgtgaacattttggcatccgaccgaaattatgaattaaatattgaaatatttattgacaatataattcattttcaaataacggatgaatcttataaagtaaaattttcagaatatttatttgaaaataaagaaaaaaatgattgggatagaaatcctgctataaattattttttcgagataatagatgatagttatatggactggttgaaagaagaaagttttgatttttttgaaaagaaatattataaggcttatattttcttttttagcgattctgtaatagaagttatcagctcgacagaacctgtattttattcaaaataacaaattatcaaacaaagctctgattaaaaacccaacaatcaaaataccgtctgaaacgatattcggctttcagacggtatttttgacacaaagcaggtaaccaaaggagtgtttgacggaaaaggagaagctaaaataccggatgtatcggttgggaagcaatggataaaggtaaataattatgtggaaaattagtaaagaaaattgtgaagatttaggatttgcaatagtctgtatgttctatgatgctattaatctttctgaatttaaattatggttggatatagttgtcagagatattcctattgatacaattccattgtatatttttgatttgattgattttgataagagtataggggaaatttatgatgtaattggagtcgttaattatggttacatttcaaatgatcaaaaaaatgcattaacgggcattgccttcttaagggggatagatgtctatgatccgcctatttcaaaagaaaaagcattaaaagccttagagaaatatcctgaaatttatcagaggtttcagcatttctttccttttgtagagcttccgcttttttaaaagacaatatgccgtctgaaaagttttcagacggcattttttatttcttccagtaggcgggggtgaagaggatgaagacggtgaagatttccagcctgcccaagagcatggcggtaacgcagatccatttctgcatcacgtccaaaccggcgtaattgccggcgggcccgacttcgcccaggccggggccggcgttggtgatgcaggcgatgacggcggtgaaggcggtggtaaattccataccgctcgccatcagcaggaagctgaagaggacgacggtcataaagtagatgaagatgaaggacataacggtcagcgcgaggcggtcgggtatggccttgccgctgattttgacggtgcggacggctttggggtgcagcagcaccatcatttcgcgcaggctgaatttgaacaggacgagggcgcgtatggttttgatgccgccgccggtcgagccggagttggcgaggatgttggcgaggaaaaacatccacagggaaatcaggagcggccattgtgcgaagtcggtgttggccagcccgtttgccagtccgatggagacgaagttgaaggcggtgtagcgcagggattcggtaaaaccggcgtaatagccggtgtgccacaggtacagggcggcggcaaggatgctgccggagagcagcagcagcatcgtccggcattcttcgtctttccaataggttttgaggctgcggctgttgagggcggcgaaatggttggcaaaattgatgccgccgacaatggtgaaaacgatgatgaccgcttcgatgaggggggagttgtaataagctatgctggcatcgtgggtggaaaacccgcccagcgagagggtagccatcgcgtgacagacggcatcgaaccagcccatcccggcaaaatgcaggcaggctgccgcgaggatggtgatcagggtgtagccgaaccaaagttttttcgccacttgggaaatgcgcggcgacattttgctttctttgtcaatgccggggatttcggctttgaataactgcgtgccgcctacgccgagcataggcaggatggcgacggcaaggacgatgatgcccatcccgcccagccagttgagcatatgccgccaaaagttgacggagggggcgagcccgtcgacgtgggggatgacggtcgcgccggtggtggtcagtcccgacatcgattcaaaaaatgcgtcggtaaagcccatattcgggaaatacaggtacatcggcatcgcagccatagcggcaaacgccagccacaacatcaggacgagggtaaagccgtcgcgcgggcgcagttcgcgcctgaaccggagggtggcgagccggacgatgcacgagccggaaagggtaacggtcgcggtggtggcgaaggcggtgtacgcgccgtccgaaaaggcgtaggagagggcggcgggtatcagcaggataaaggaaaacagcatacccagtcgggagaggacgtgggcgatgggcaggattttgtgcatagtggggcggtccgttattttgcgaagcttttccagtctatgccgccggcggcttggacttgggtaatttcttccgtttcgaggttgacggcggtcagctgtccgccccacagcgcgccggtgtccagcgagatgacgttgtcggcattcgtgtagcccagcgaggaccagtgtccgaagatgatgtgcgtcgaggttttgccggtcgggggctttgaaccacgggcgcaggtaaggcggcatttttttcactgtggatttgtagtcgaaatccagttcgtttttaaaggtcagggcgcgcatccgcgtgaaggcgttgacgatgaagcgcaggcgggcatagcctttcaaaccttcgtcccacgcggccggtttgttgccgtacattttggagaagaatttgacgtattttttgccgcgcagttcggcttcggcttctctagcgagcgattcggctttggttatgcgccattgcggcaggatgccggcgtgtaccatcacgcggctgccctcgcgtatcaacagcggttgcgcacgcagccagtcgagcattttttttccgtcggggtgtttgagtatgggttcgattgtgtcgctgcgtttgggcgcaccttcgccgcagccgacagcgagcaggtgcaggtcgtggttgccgaggacgatttgcacgctgttttcgtgccggatgcagaattgcagcgtttcgagggatttcgggccgcggttgacgatgtcgcccgtcagccagagggtgtccgtgccgtggttgaaaccgattttgccgagcagcgcggtcagttcgtcgaaacagccttgtatgtcgccgattgcgtaatgtgccattgcagatgttgtgaagtgggaaagtgttgcggttcggacggcatggttttgaaatatcatgcagtccgaacgtggaattatgcgttcaaaacgaggacggcttcggcttcgacctgcacgcctttgggcagcgaggcaacgccgacggcggcgcgggcggggaagggctcggcgataaattccgccatgacttcgttgaagacggcaaaattgcccaagtcggtcaggtaggcgttgagtttgacgatgtcggccagcgtgccgcctgccgcttcggcgacggcttgcaggttttggaacacttggcgcgcttcggcgcggaaatcgccgttgccgacgacggtcatcgtggcgggatcgagggggatttgaccgctcatgtaaacggtgtcgcctgctcggacggcttggctgtacgcgccgatggcggcgggggctttgtcggtgtggatgatggttttggacatttcggattcctcaaaaaatagggcggcagaagccgcagcattcgggattatcgtacaaaaccgccggcttgtgtagttgcggtggcagaaaacaaaaccgccgaaggctcggcggtttgcagaataaggcgcatatcagaatttgacgcgcacaccggcggacagttcgccggaacggacgtttttgacagtgttgactttgccgatgtagttgtagcggtagccggcatccaaatcgacattcggggtaacggcatagcttacgcccgtcaatacgccgaggccgatggaggtttggctgaagctgtcgctgccgcccaagtcgacggaggcgcggttgaggctcaagcgcgcgccgagatacggtttgacgggcgattgggtgtcgaagtcgtaaatggcggacgcgccgatgctgtaaagtttgaaatcggtggatggggctttatagtttttgtagcgcgtgtaatcgacggcgaagcggaggtcgttgatgcggtagcctgcggagatgcgcgggctgaagcctttggcagaacctaaagagcttgaggcttttgcgtgtgcggcatcggcttggacgtaaaagccggatgcgccttccgccagtgcggcggccgggagagcgagggcaatcagtgtggcaagtgcttttttcatattttggttcctttatggtcagttagaaaaattgttaagaatccgttaaagaatcctgctgtattatacttaaattttctttttgcatcgtaatattttcaatacttcaagatacgtagcggtatccggctgctttgccgacggcaaagccgttaacccgcgcgttgcctttaaatggtggcggcggcatcacgcggcggatgggtgaaacttgcaaacggtttggaaaaaacagcggtatctgtcggattgttgcaggtgcaggcatacggttttgtgtgcgtctgtgccttaagcgtcggacatttccggcggcggctgtgccgtctgaaacgcccggcgggggatgcggctgcgttttccatcgataagcatattttccggacgcgttcggggcgggttttcccgggcggccgccgatttgtttgcgcttatatagtggattaacaaaaatcaggacaaggcgacgaagccgcagacagtacaaatagtacggaaccgattcacttggtgcttcagcaccttagagaatcgttctctttgagctaaggcgaggcaacgccgtactggtttttgttaatccactataaaaaacactgcagcaaatcgtttaaaaacaagcgtcctttttcggtcgggcggaatacggcagggtcggtttccagcaggcctttttgccttgccgtttcgatttgcgccatgattttggcactcggtacgcccgtgcgctcctgcaacatcgcggcgggtacgccgtcggtcaggcgcagggcgttcatcatgaattcgaacggcaaatcttcggcagcgacggttttgcgttcgacggcttcactcggttggctttgcattaaggcgaggtagtcgttggggtggcggcggcggacggtgcgctcgatgcggtcgggataggaaattttgccgtgcgcgcccgcgcctatgcctaaataatcgccgaactgccagtagttcaaattgtggcggcactgcatggctggtttcgcaaaagccgatgtttcgtagtggacaaaacccgcgccttccagcgcgccgtgtaccgcgtcttcgatgtcgagggcggcttcgtcttgcggcaaacctttcggcggcgtatgaccgaacggcgtgttcggttccatcgtcaggtgatacgcgctgatgtgggttgcgcccgtagcgatagcggtttgtacgtcgtccaatgccgtctgaacggtttggttcggcagggcatacatcaagtcgatattgactttatcaaataatttcaaggcggtatcgatagcggttaaggcttccttaccgttgtggacgcgccccagccttgagagcatatcgtcgttgaaactctgtacgccgatagaaagccgcgtaatacccgcgtctttaaatccttgaaacttctcgatttcaaatgtccccggattggcttccaaggtaatttccgcttccggctgcaagcgcaacagcgaacgcacgccgcttaacaaacggtcaatcgattccgcctgaaacaggctgggcgtaccgccgccgaaaaagatcgtttccaccggcctgccccaaatattgggcaattcaagctgcaaatcggtcagcagcgcgtcgatataggcggcttcgggcaatccgtttttcaggctgtgggaattgaagtcgcaatacgggcattttttgatgcaccacgggatgtggatgtaaagcgacaggggcggcagggcggtgagtcgggtgcggtttggaaaggaaatggtgtgcatggtgtggttcggaaaagtgggcaatgccgtctgaaggcggttcagacggcatgggttcagccgagcagggtaagcagttcggcttcgctgaggacggaaacgcccaaggcattggctttttccagcttgctgcccgcggcttctccggcgacgacgtaatcggtttttttggacacgctgccggaaactttgccgcctgcggcttcgattagggattgggcttggtcgcgtttgagggtgggcagggtgccggttaacacgaaggttttgcccgccacggctttattgatgccgtctgaaccttgcgccgcctcgtcttcagacggcatttgcgcgaagaaggttttcaggttttcgagcagggcggcgttttgtggttcgctgcgccacgcctgccagtcggtggggagggctttgtcggtttgcagcccttctatgtttttgccggcgagttcccataaggcttgggctttgttttcgctgattttgaaaccgggcaggcgggcgatccagcgttgcggttcggcgtggcgggcgggcgggatggtaacggcttgggtttgcggggcaacgcctgcggcgagcagttcgtctatcatcgcctgctgttcggcttgggcgaagaagtgggcaatggaacgcgccactaccgtaccgatgtcgggcaggcaggcgaggacgggttcgggggcgcggcggacgcgttccaatgtgccgaatgcctgtgccagcgttttggcggtgcgttcgccgacgtggcggatgccgagcgcgaacaggaagcgggcgagttcgggcgttttgctggcttctatgcctgcgaggatgttttccgcccacttgactggttgttttttatgtttgcccgacgcgccgaccgaactgccttcagacggcatttgatccgattcggcaacggttttgtccgctgtttccttcattttttgcaaggtcgggatgtcgaggcggtagagatcggcgaagtggcggacgaggtcttgcgcgacaagctgttcgatttgtttttcacccaagccgtcgatgtccatcgctttgcgcgaggcgaagtggattaagccttgcgcgcgttgtgcctgacaaagcataccgccgctgcatcgggcgacggcttcgccttcttcgcgttcgatttcgctgcggcagatggggcagtgggtcggcaggcggtagggcttgtggagcggaacggattgggtttgattggcggacggtgtttcggcaaacaaatcgtcctgccgatgcccgatgccgtctgaaacggcaacggcggtttcccgcatcgggcggcgttcaaaaatcacgcgcacaacttcgggaatcacgtctccggcacggcgtacgacgacggtatcgccgacgcgaacgtctttgcgcgatacttcgtcctgattgtgcagggtggcgttggtaacagttacgccaccgacgaatacgggctgtaatcgggcaaccggcgttaccgcacccgtcctgccgatttgcacgtcaatcgcttcgacaatggtcagggcttcttcggcagggaatttgtgggcaaccgcccaacgcggcgcgcgggagatgaagccgagttcgtgctgttgcgccaagctgttgactttgacgaccatgccgtcgatttcgtagggcagttcggggcgtttttgctgcatgtgttcgtaaaacgccaatacttcgtcgatatttttgaaacagccgaaattgccattgggcagactgaagccgagtgcttggaaataggcgagttcctggatgtgttcttccgcgacgaaaccatcttgctggcgggcgacggagtaggggaaaaagtgcagtttgcgttgcgcggtgatgcgcgaatcgagttggcgtaggctgccggcggcggcgttgcgcggattggcaaagggtttttgcccgttttcggcttgtcttttattgagggcgacaaaatcggctttgagcatcagcacttcgccgcgtacctcgatgagttcgggcgtattttcgccgtgcagccgcaaggggatgttggatacggttttgatgttttgggtaacgtcttcgcccgtcgtgccgtcgccgcgcgttgccgcctgcaccaatacgccgtcgcggtagagcaggctgatggcgaggccgtcgaatttgggttcgataacgtattcgggattgccgccgtccaagccgtcgcgcacgcgttggtcgaaggcgtacatttcggcatggtcgaacacgccgttttcatcttgcggggaaaaagcgttggtcagcgacagcatcggcacttcgtggcgtacttcggcaaatcccgccaaaggctcgccgccgacgcgctgggtcgggctgtcgggcagtttgagctcgggatggtttaactccaacgcttcgagttcgcggaacaatttgtcgtattcggcatcgggtacgctgggcgcgtcgagggtgtagtattcgtaggcgtagcggttgaggaggtcggtgaggcggcagatgtgttgtgcggcaaattgttttatatcactatcagacggtttaagaagattggtaaagttagtgttatgttttgagtttggattcatgagagaaggttttcagacgacctttgtctgatacgggatgaaacgggcaaaggtcgtctgaaaaatgataggttgaaaacagctgaattttacccgaaaaaaagcggatatgccgtaacgacatatccgctttgattgcattcgattttaggagaacaggcgcaatgcggttttgccgcccggttcgataccgactttgagcatctcggactgacgcgccaatacataagtgcgcacgtctttgagccattgggtcgaaacttcttccattttgtcgttgaccagattcaggttcaactggccggacaggcgtaccgccaaatccataaacaaatcgtcgaaggttttttcgcctgccggagagtgcgggatgtcgagcagcatactgaagcctttgtaggactggttgtccaaaagggcgttggtaaacggctcgttgttgagcgagcagatggagaacatggtcgagcccgacgtgtcggtatagtggaacgcgccgtcgtcttccaaaacgaaacccacgcccgttacggcggaacgcagttctacgccgctgatgctggtcggggaaaccaaatggatggcgatggtctggtcgacgcgcgcgcagaatgcgtccagtgcggaagccacttcgataaaggcggcaaggtcggtgtgcagcgtctgaccgcccatgctttgtgcgaatgcgtccacctggcggttgaatgcggagagttcttcctgcgaggcaagtccgttgcggctgactgcctgaatacccacgataaatgcctgatagcggatgcccgggatgggttcggcaatctggaaatggtcgtccatggtgcagccgacaatctggtagcggcagcggttggaaaggcgcggcagtgcgtgcagttctttggcttcggtcagcgcgatataggagatgaagtcgaagcgcacgtcaaaccagggtaattcgacttttgacagttctttgagcgtaatcagcggttttgcaggtgtttgcggaacgggtgcaggttttgccggcgcgtcggcaggtttcggtgcggaatgtccggtttggggttcggaaacggtgtgggcggagttgccgataatgccgctttcttccaaggcggtttcgatttcggttttgaacggggaggcttttgcctgtttctgcttggcgatgtagacggcatcctgttcttgcaggttgcgcatggcggggtcttggggttttgccgtttttttgaccgccggttggggtttcggcatcatgactgacccgccggacggtttgccgtcgcggacatggctggttttgctgttgagcagggcatctttgtcggagtgtccgaactggtcgcgcacttttttgcggtattggttttcctgatacatgttgtaggcgacaacggcgaggacgacagctagaaacagtacgatgtaaatcatggcaatcacttgttaaatttcgggatgcaggatacgcaaagtgcgggtactgcggttaaatcgggcttgcactgcggttaaatcgggcttgcgtttccggcagtctgacggaacggccgattataacgtttgaattataacgaaaattgcagggtctgacagcagtgtgtcgaaataagcggaaattttccgaaatgccgtctgaaatctgtggttttcagacggcatttctgtccacgagaaaccctttctcccgtatccgccgccagtcgaaaaaatggccggggtcggttttgcggccgggcgcgatgtcttggtgccccgttaccgccgtgacggggtagtggcggcagattgcgtccaacaaggcttcgagcgaacggtattgcgcttcggcaaacggttcgaaatcgcagccttccagttcgatgccgattgaaaatgcgttgcatttttccctgccgccgaatgaagatacgccggcatggtatgccatattgtcgcaggaaacgaactgtaccgtttctccgtcgcgtttgattaagaaatggctggatacgcgcaaagtgtgtatcaggctgaagaacggatgtccgtcggggtcgagccggttggcaaacagcttttccaccgcatccgtgccgtattcgaacggcggcagcgaaatgttgtgcaacacgatcagggaaaccgtttcccccgtttccctcgggctgaaattgggcgacggggtatggcgtatgctttgaagccagccgttttgccagtgtgcttcggcgtgattgtccatgatgttcttcctgtccggcgggcaatttgggttatactgtcgcccgaattttaagacgtattccgaatgctgggaatcctaccatgttgagaaaattgttgaaatggtctgccgtttttttgaccgtgtcggcagccgttttcgccgcgctgctttttgttcctaaggataacggcagggcataccgaatcaaaattgccaaaaaccagggtatttcgtcggtcggcaggaaacttgccgaagaccgcatcgtgttcagcaggcatgttttgacggcggcggcctacgttttgggtgtgcacaacaggctgcatacggggacgtacagattgccttcggaagtgtctgcttgggatatcttgcagaaaatgcgcggcggcaggccggattccgttaccgtgcagattatcgaaggttcgcgtttttcgcatatgaggaaagtcatcgacgcaacgcccgacatcggacacgacaccaaaggctggagcaatgaaaaactgatggcggaagttgcgcccgatgccttcagcggcaatcctgaagggcagtttttccccgacagctacgaaatcgatgcgggcggcagtgatttgcagatttaccaaaccgcctacaaggcgatgcaacgccgcctgaatgaggcatgggaaagcaggcaggacgggctgccttataaaaacccttatgaaatgctgattatggcgagcctggtcgaaaaggaaacagggcatgaagccgaccgcgaccatgtcgcttccgtcttcgtcaaccgcctgaaaatcggtatgcgcctgcaaaccgacccgtccgtgatttacggcatgggtgcggcatacaagggcaaaatccgtaaagccgacctgcgccgcgacacgccgtacaacacctacacgcgcggcggtctgccgccaaccccgattgcgctgcccggcaaggcggcactcgatgccgccgcccatccgtccggcgaaaaatacctgtatttcgtgtccaaaatggacggcacgggcttgagccagttcagccatgatttgaccgaacacaatgccgccgtccgcaaatatattttgaaaaaataaaccatgccgtctgaaaagtttgtgttttcggacggcatacccttaccggaactgcaagcatgaaaccgcaattcatcactttggacggcatagacggtgccggcaaatccaccaaccttgccgtcatcaaggcatggtttgaacggagggggctgcccgtgctgttcacgcgcgagccgggcggaacgccggtcggtgaggccttgcgcgaaatcctgctcaaccctgaaaccaaagccggtttgcgtgcggaaaccctgatgatgttcgccgcgcgtatgcagcacatcgaggaagtcatcctgcccgcgctttcagacggcatacacgtcgtgtctgaccgttttaccgacgcgaccttcgcctatcagggcggcgggcgggggatgccgtctgaagacattgaaattttggaacattgggtgcagggcggtttgaagccggatttgaccctgctgctggatgtgccgctcgaagtgtcgatggcgcgtatcgggcagacgcgcgagaaagaccgtttcgagcaggagcaggcggatttctttatgcgtgtgcgcggcgtttatctcgaccgagccgccgcctgtcccgaacggtacgccgttatcgacagtaaccgcaacttggatgaagtcagaaacagcatagaaaaagtgttggacggacatttcggctgctgatgcggcaaatattgaaacaagcgcatccgcccgcgccgaaaatcaaacggcagtgccgcaggtgaaaatggcggtatgcgccaaactttcggcatgatagaattacgctcggttacaaggcaggatgcgtcggcaatattaacgaaccgcccgtaacatgatgacccgaaagcgtttcggacagtccgattcaaatctttttctcgcaacaggattgacacatggaaaactcattgaaagaagccgccctcaagttccacgaattccccgtgccgggcaaaatttccgttaccccgaccaaatctctggcgaccgacaaagatttggcgttggcgtactctccgggcgtagccgctccttgtatggaaatccatgccgatccgcaaaatgcctacaaatacaccgccaaaggcaacttggtcgctgtcatttccaacggtacggccgttttgggcttgggcgacatcggcgcgctggcgggcaaacccgtgatggaaggcaaaggcgtattgttcaaaaaattcgccggtgtggacgtgttcgacatcgaaatcgatgaaaaagacccgcaaaaactcgtggacatcatcgccgctttagagccgaccttcggcggcatcaacctcgaagacatcaaagcacccgagtgtttctacatcgaacgcgaattacgcaaacgctgcaaaatccccgtattccacgacgaccagcacggcacggccatcattaccgccgccgccgtattgaacgccctgcgttttaccggccgtaaaatcgaagaagcgactttggtgtgttccggcgcaggtgcggccgcgattgcctgcttgaaccaattgctggatttgggcttgaaacgcgaaaacgtgaccgtttgcgactccaaaggcgtgatttaccaaacccgcgaagacaaagaccgtatggacgagtccaaacagttctacgccattgaagacaacggccagcgcgtgcttgccgatgccgtcaaaggcaaagacatcttcttgggcctctccggcgcgaacctgctgacgcctgaaatactgaacaccatgaacgaaaaacccatcgtgttcgctatggccaacccgaatccggaaatcctgccgccgctggcgaaagaaacccgtccggacgtggttatcggtaccggccgctccgacttcccgaaccaagtgaacaatgtattgtgcttcccgttcatcttccgcggtgcgttggatgtcggcgcgacgaccatcaacgaagaaatgaaacgcgcctgcgtgtatgctttggcggatttggcgatggaagaagtaaccgaagaagtggttgccgcttacggtaagaaatttgaattcggcgcggaatacctgattccgactccgttcgattcccgcctgctgccgcgcgttgctacggctgccgccaaagcagcgatggaaagcggtgtggcaacccgtccgattgcagatttggaagcttacgctgccaagctgagcgaatggaagctgtaagccgtttgcggtttaaaatgccgtctgaactgttttcaggcggcattttgctgtcagattgatatagtggattaacaaaaatcaggacaaagcgacgaagccgcagacagtacaaatagtacggaaccgattcacttggtgtttcagcaccttagagaatcgttctctttgagctaaggcgaggcaacgccgtactggtttttgttaatccactataaatgaaagatactgaaaaatgaaagagatgaaacctgtccgttatcatattggcgatatgcccgagacttcaaaacaaaccgcctcccgtcatgacgacagggcagtgggtgttgacgatgattgttttcatgattcctttggtcaatttttgtttgggtgttcggcagaggcaacccgaaccgcgccaatttctgtaaagcgcagttgcttatttacctgattggttcgcttatcggtttggtcttcgcgttgtttataggtgggtctgtatcaggtacgcatgattaatgccccgggctgattttgcttcgaggatttgtatcgaatatgccgaattgtttcaaatttcataccgttatcgaacggcattggcaaaaaccttatccggttttgtcttttctgcttaagccgctctccgggctgtttgccaaaattgcggcaaaacggcggacggattttttatcgggaaaacggcaaagcgaaaagctgcccgtgcctgtggtcgtggtcggcaatattcacgcgggtgggacggggaaaacgccgattgttgccgcgctggtgtcgggtttgcaggaaaagggcgtcaaggtcggcatcatcagccggggctacgggcgcaagagcaaggcggttcatgtattgaatgctgagagccgagcggaagatgcgggcgatgagcctttgctgctgttccgcaaaaccggtgcgccgacggcggtgggcagcagccgtgcagaggcaggcagggcgttgctggcggcgcatcccgacatcggactgattgtggcggacgacggtttgcagcattacgccctgcggcgagatgtggaaatcgcggtgtttccggcggcggatacggggcgcacggatttggatttactgcccaacggcagtttgcgcgaacctttgttgcggctggattcggtggatgcggtcgtcgtcagcggcggcaaggcggatgcgctgtttaggccgtctgaaaatatgtttcacagccgtatcgaagcgggacggatttaccgtttgaacaatccgtccgaaatactggacacaggccgtctgaaaaatcaaaccgtcgtcgccgtggcaggtattgccaagccggcgcggttttttgattcgttgcggaatatgggcattaccgtgaagcgaaccgtcgcgctgcccgaccacgccgacatttcggcggcagatttgcccgatgcggacgcggtcattattacggagaaagatgcggtcaaattttcagacggcatttgcaccgataatgtttgggtgttgcccgtttgtgcgataatcgaacctgatttggcggcgtttgtgttggagcggttggaagatgtaccgaaggccgtctgaaagcacggtttgggcggagtgattacggatttgaataagaacgcctcgcgccatcattcccgcgcaggcgggaatctaagtctcgaattttcaggaatgcctaggaggctccagaaatcccaaatctccggatttccacttggacaggaatgagaaaaccggtcgtattttttatctgcattaatcattcattaaaggattgaatattaaactgaaaaccttgttattgcccttcgccacgctggcattgtgcaccaatgcttttgccgccccgcccagcgacgcgtcgttggcgcgttggctggatacgcagaattttgaccgggatatagaaaaaaatatgattgagggctttaatgccggatttaaaccgtatgcggacaaagcccttgccgaaatgccggaagcgaaaaaagatcaggcggcagaagcctttaaccgttatcgtgagaatgttttgaaagatttgattacgcccgaagtgaaacaggctgtccgcaatactttattgaagaatgcccgtgagatatacacgcaagaagaaattgacggcatgattgccttttacggttcgcctgtcggtcagtccgtcgttgccaaaaatccgcgcttaatcaagaaatcgatgagtgaaatagcggtatcttggactgcattgtcagggaaaatcgcgcaacatcatctgcccgagtttacggaagagttgcggcgcatcatctgcggcggtaaaaatcccgatgcgggctgtaaacaagccggacaggttgggaaaaggcatcagaaataaatgatagccgtctgaaatattgaagagggcatccgattgattgaaccatcaaacccgaaagcaaccctatggaaaaaaaattcttagacatcctcgtctgccccgttaccaaaggcaggctggaatatcatcaggacaaacaggaattgtggagccgtcaggcgaagcttgcctatccgattaaagacggcattccctatatgctggaaaacgaagcgcgagcgttgagcgaagaggaactcaaagcatgaccgaattcgtcgtattgattccggcgcggctggattcgtcgcgcctgcccggaaaagccttggcggacatccacggcaaaccgatggtcgtgcgcgttgccgaacaggcggcaaaaagtaaagccgcgcgcgtcgtcgttgccaccgaccatcccgatattcagacggcctgtcaggcgcacggtatcgaagtcgtcatgacttcaaaccggcacgaaagcggcacgacgcgccttgccgaagcctctgtcgcgctgaagctgccgccgcatttgattgttgtgaacgtacagggtgacgagccgctgattgcccccgaactcatcgaccgcaccgccgaagtactcgtcgaaaacaacgtccaaatggcgaccgccgcccacgaattgcacgatttcgacgaattgatgaatcccaacgccgtcaaagtcgtcctcgacaaaaaccgcaacgccatctacttcagccgcgccccgattccctatccgcgtgatgcgatacgtgccggaaaacgcgaaatgccgtctgaaaccgccgtcctgcgacatatcggcatctacgcttaccgcgccggcttcctgcaacgctatgccgaaatgagcgtttcgccgctggaaaccatcgaatcgctggaacagctgcgcgtcctgtggcacggttatcccattgccgtcgaaaccgccaaagaagcccccgccgccggtgtggatacgcaagaggacttggacagggttcgcgccgtatttcagaccgtataaaacaggttcaaagggaaaagatatgcagcaacatattgaaaagtggcaacacttgagccgggaagaacagaaaatccttgctgaagtatggggtctcgtgcaaaacgacgatcaggaggttcactatgaaatgctcaaattgaacgcacccgatgaagccagcggcgaattttggttcagaatggcagaaacactcagcaccctgccgcccaaccgttccctcggccttagaatgaacggcggcaggctggcgaccgccgtatccatcctttccgtcatgattgaagacaatcccgacataccgcagctttgggcgcaaaaaattaccgcgctcaattatagtggattaaatttaaaccagtacggcgttgcctcgccttgtcgtactatctgtactgtctgcggcttcgtcgccttgtcctgatttttgttaatccactatatttggcacacgggcacaaagcccgtgccgacggtttggcacaacagcccgacaaagcggcagaagccaacgaggaggaatacctgaccaaagccctgtcgcaaaacctgctgtcaacattggatgtcgcgcttgcacgttttcctgaagacgcgtggtttcaggaaatcaaacaggatgcacaaaagcattttgcttgaggatgtggcagtcaggaatatttccattcaggaagaaaagaagtgcctgattgggtataatcagggtaaatcttattttatttcaaaagattaatatttgctttctgtttttccttgacggtatcggaaaagttgattatagttacagcttccttaggagtaatggctgagaggctgaaggcacttccctgctaaggaagcatgtggggtcaacctgcatcgagggttcgaatccctcttactccgccagataaaaaatagacgctgtgttttacagcgtctattttttatgcaattttatagcgggttggtgcaaaaccagtatggtattgccctgtcttgattctgaattttgttatagtggatgaacaaaaaccagtacggcgttgcctcgccttagctcaaagagaacgattctctaaggtgctggagcaccaagtgaatcggctccgtactatttgtactgtctgcggcttcgtcgccttgtcctgatttttgttaatccactataatccgagatgcttgccgtttatttccgcctcgttcaaacggcggctctgatttgcgcggtttctgtttgccgtattcgcctatccgtaccgcaaatgttatactgggaaaaatttactgattgtgttttacggcatatttgccgataggatggaagagacaaatgagcagaatccggcaggcttttgccgctttggatggcggaaaggcattgattgcctatattacggtgggcgaccccgatattcggacaactttggcattgatgcacggcatggttgcaaacggtgcggatattttggagttgggtgtgccgttttccgatccgatggcggatgggccggttattcagcgtgcggcggagcgggcgttggcaaacgggatttcgctgcgcgatgtcttggatgtcgtcagaaaattccgtgaaaccgacacgcaaacgccggttgttttgatgggatatttgaaccctgtacataagatgggttatcgggagtttgctcaggaagccgcaaaggcgggtgtggacggcgtgttgacggtggattcccctgtcgaaaccatcgatccgctctatcgcgagctgaaggataacggggtcgactgtattttcctgattgcgccgacgacgacggaagaccgtattaaaaccattgccgagctggcaggcggatttgtctattatgtttcgctcaagggcgtaacgggcgcggcaagtttggatacggatgaggtttcgcgtaaaatagagtatttgcatcagtatatcgatattcccatcggtgtcggtttcggcatcagcaatgcggaaagtgcacgcaaaatcggccgggttgccgacgcagttattgtcggcagccggattgtgaaagaaatcgaaaacaatacaggcaacgaggctgccgccgtcggtgctttggtaaaagagttgaaggatgccgtgcgctgacggcggttcctcatcctgaatattttaggagttgtccatgagctggttagataaaatcctgccacccaaaatcaagaatcgcggaaaagacggttcttccaatgttcccgagggtctatggcacaaatgcccgtcttgttcggcaaccgtttattctaccgagttgcagcagaacaatcaggtttgtccgaaatgcaaccaccacaatccgttgtcggcacgacaacgcctgaacctgcttttggatgaggatggcagggaggaagttgccggaaatgtcaaaccgacagatcctttgaagtttaaagacggcaaaaaatatccggatcgtttgagtgcggcacgcaagctgaccggggaagatgatgctttggtggtgatgaaaggcaagatgaacggcctgcccgtcgtcgttgctgcgtttgagttccgctttatcggcggttcgatgggttcggttgtgggcgaacgattcgtacaaggtatccgtcgggcggttgccgacaattgtccgttcgtctgtgtggcggcttccggcggcgcgcgtatgcaggagggtgtaaactcgctgatgcagatgacgaaaaccagtgccgcgctgcatttgctgacggaaaaacgcctgccatttatatcggtgttgaccgatccgactatgggcggcgtatccgccagcttcgcatttttgggcgatgtcgtgcttgccgaaccgaacgcgctgatcggttttgccggtccgcgcgtgattgagcagacggtgcgcgaaacgctgccggaaggcttccaacgcgccgagttcctgctggaaaaaggcgcaatcgaccagattgtcgaccgccgcgatatgaagcggcgcatcagtgatttgattacgctgttgtgccgtcaggacaaagtttccgccgcctgatggctgatgaatcgagtaccgtctgaaaccgatgtttcagacggtatttttgtgtctggttatttgttgtgcggctttatcgatggggcatagcgtccggcacgttctttcaggcgttgtaccaaacctttcgtgtcggcgggtacaccgccctcgcagaatgcctgatacaggacggtgcgcagtgcgtcgttgcggcttaatgtaccgcctatcggtttccattcggcgtttcggggctgtatccagcggcggttgaccgtgtcgccgtagccgaacactttataggaggaaggtttgccgttgccgaacctgatggagaagcgggcgcagaatatgcctttggcagtcaggttgtcgtagcctttgtcggagcggatattgagaatgtagcggatgctgccgtcgggcgcgggcataatttgcaggctgtcgagcaggattttcggctgtttgccgtaattttcatccacataaatgtcgaaccagccgtccgagtgcgtatcgggcagcggcggcagtttggcggtatgttctttaaattcgcgggcggcggcctcttcgggcgtttcgcggtagcgggtgttgatcggcgtgtctttttggctgaagccggcagcgagggacgtgccggcggcgagtgcgagcagcaggagggcggtgcggcgcataagtttctccaaattgaaaacggcgttattttatgggttggcaaagggggctgcaagcaactggggtataatctccccccgattcccattttttaaacggtacaaacgatgaacagcgaaactttagacgtaaccggattgaaatgtcccctgccgattttgcgggcgaaaaaggctttggcgcaaatgcagcagggcgacgtgttgaccgttctggcaaccgacggcggcgcaccgggggattttgaggctttttgccgccaaaccggtcatgtgctgttggatgcttccgaacaggacggcgtgttcacgctggtcgtccaacacaaataaatgccgtctgaaatgcggatgtcccgcccgacggcgttgtttttgaatatcgtatgtgccgcgtgccgtttcaaaaacaaaccgtccggcgtgcagtgtcggcatttcgggcgtatcgccgccgatttgttccggaatggctgttaaccgccttgccgtcggcaaagaagcaaaacccaagcacaatcaaaatctaaaggctgtgtttgaagattccgttgatgcaacccaatcagtcggacaaaatgcctttcatccaatggaaccggtttccgaccggacggaataaccggctttcccccggcaaacggatggaatcgaccgggtattcaaacgcagccaaaacctaaaaaggaacaaccatgcaaaccctgaccattatccgccccgacgatatgcacctgcacctgcgcgacggcgacgcgctcaaagccgttgccccttataccgcccgccaaatggggcgcgccgtcattatgcccaacctcaaaccgcctgtcgtcagtgtagccgacgcgcttgcctacaaagcgcgcattatggcggcgttgcccgaaggtagcgcgtttgagccgttgatgacgctttatttgactgataacgccacgcccgaacttgtacgcgaagccaaagccgccggcatcgtcgccttcaaactctaccctgccggcgcgaccaccaattccgattccggcgtaaccgacctgttcaagctcatccccgtgttggaagaaatggcgaaacagggcattttgttcctcgttcacggcgaagtaaccgaccccgaaatcgacatcttcgaccgcgaagccgcctttatcgggcgcgtgatgaaacccgttttggcgcaagtgccgaatcttaaagtcgtgttcgaacacatcaccaccgccgaagccgcccgcctggttttggaagcaggcgacaacgtagccgccaccgttaccccgcaacacctcctgctcaaccgcaacgacctcttggtcggcggcgtgcgcccccatcatttctgcctgcccgtactcaaacgcgaaacccaccgtcaggcattggtcgccgccgttaccggcgagaaggcgcataaattcttcctcggcaccgactccgcgccgcacgccaaatccgccaaagaaaacgcctgcggctgcgccggtatgttcagtgcgatgaccgctatcgagctttacgccgaagtatttgaaaaagcaggcgcgttggacaaactcgaagccttcgcctcaaaaaacggcgcaaggttctacggcattcctgaaaataccgacacgatcaccctcgtcaaacaaagccaaaccgttcccgcaagtgttccctacggcgacggcgaacttgtcccgatgcgcgcgggcggcgaaatcggctggacggtgcagtattgatgggctggaaacaaaatgccgtctgaagggagggctttcagacggcatttgtgttgctgactgattgatacgtcaacggcgtttgagtttgttacgtttcggttatttccgataaattcccacaattttcaaatttcgccattcccacgaaggcaggaatccagaaattcgatgcgaccagagtttatcaaaaacggcagcaactcaaaaaaccggattcccgcctgcgcgggaatgacgagattgaagtttcagaatttatttgaaatacccaaaattcaaaaaaccaaattcccacctgcgtgggaatgacgaaacaaagaaagcagaaataaggacatagaactttctttaaatttgtgatgcatcaacggcgtttgggctcgtcggggcggatttgggcggcgagtttgtcgaggatgccgttgacgaatttgtgcccgtccgtgccgccgaaggttttggtaacttcgatggcttcgttgataatgacggggtagggcgtttcgggcatggcggacagctcgtggcaggcggtcagcaaaacggcgcgttcgatggggttgaggtctttttcgtccctgtcaagtagcgggcggatttgtcggatatactctgccgcattggtttgcgtgccgaagaaaagtttgttgaacaattcttcgtctgccttggcaaagtcggacatttcgcggatgtttttagcaatttcgggcgcggcggtgcggttgataagggattggtaaacggcttgtacggcaagctcgcgggaacggcggcgggctgttttcatgatttttccttgaaacggttgggcggcacggtatgccgtctgaaacggaaagggtgtattggtgtacgccctgtttgttattcttcgtcttcaaactgttcttcgagcagcaggttgacgaggttggcgcattcgacggcgactttggcggcatccgaggctttttcttcaatccgttcgattgcctgcgcgtcgttttcggtggttaggacggcattggcaatcgggatattgtagtcgagtgcgacgcggctgacgcctgctccggattcgttggaaaccagctcgaaatggtaggtttcgccacggatgacgacgccgatggcaatcagtgcgtcaaacttttcggaagaggcaaagttcatcagcgcgatggggatttcaagcgcgccgggtacggtggcgacggtaatgttttcgtctgccacgcccaattcttggagggtgcggcagcagactttgagcatttcgctgccgatttcgttggtgaagcgtgcctgtacgatgccgatgcggaggtgtttgccgtcgaggttgggggcgatggtgttcattgggtgtcctttggtattcggaggtttcggaatgccgtctgaaggtttcagtcttgcggctgccagtcggcgacggtttggaatgtgccgtcttcggcaagctcccatgcgctgccttcgggttgggagagcagtgcggcggtttcagggttggttttggcgatgtcggcgaggctgacgatgctgaagttgtccggatcgtcggtgtattcgtcggtctcgtcgccgctgaagaaacgccagccgctgtcgttttcaaaaacgggggcttcgcggtagaggaagccgacgggccggttttgtttggcgacggtgttggtggcgatacagcggtcgagtgccgaggaaagtgcttgtgcaaatgcgttcattacgggaatacgttgggggaaaacttacggattttaccacgattcgtgcgttgtcggcagacggcggcggtttggtggtacaatgtgcgccgtttgcagccttaaggtgtttctgtatttttggagtatggaaacgcattcgggctgttttttgcggaagacggtaatgaaagacgatgttttgaaacagcaggcacacgcggcgatacagaagaaactgggctacgcgttccgcgatatttcgcttttgcggcaggctttgacgcacaggagccatcatgcgaagcacaacgagcggttcgagtttgtcggtgattcgattttgaattatacggtggcgcggatgctgtttgacgcgtttccgaagttgaccgagggcgagttgtcgcggttgcgggcaagtctggtcaatgagggcgtgctggcggaaatggcggcggaaatgaatgtcggcgacggcctgtacttgggggcgggcgagttgaagagcggcggcttcagacggccttcgatactggcagacgcgatggaggcgatgtttgctgccgtcagcttcgatgccgatttcaacacggcggaaaaggtggtgcgccatttgtttgccgatcgcgtccggcgcgccgattttcaaaatcaggcaaaagacggcaaaactgctttgcaggaggcgttgcaggcgcgccgtttcgccttgccgaaataccgtatcgaagagcaaatcggttatgccaacgacagtatgtttgtcatttcctgcgatttgggcgaactgggtttcgtgtgccgtgccaaagggacgagccgcaaggcggcggagcaggaagcggcgaaagaggctttgaaatggctggaagagaagctgccgctgaagaggaaaaagaaatgaggcggcgcgtgaatatgccgtctgaacatatggatacgaaagcaaatatggatattgaaaccttccttgcaggggaacgcgccgccggcggataccgttgcggcttcgtagcgattgtcggccgtccgaacgtgggcaaatcaacgctgatgaaccatctcatcggtcagaaaatcagtattaccagcaaaaaggcgcagacgacgcgcaaccgcgtaacggggatttataccgacgataccgcgcagttcgtgtttgtcgatacgcccggctttcaaaccgaccaccgcaacgcgctcaacgacaggctgaatcaaaatgttaccgaggcgctcggcggcgtggatgtggtggttttcgtcgtggaggcgatgcgctttaccgatgccgaccgcgtcgtgttgaaacaactgcccaagcacacgccggtcattttagtggtcaacaaaatcgacaaggacaaggcgaaagaccgttacgcgctggaggcgtttgttgcccaagtgcgcgccgaatttgaatttgcggcggcggaggcggtcagcgcgaaacacggattgcggattgccaacctgttggagctgattaagccgtatctgcccgaaagcgtgccgatgtatcccgaagatatggttacggacaaatcggcgcgttttttggcgatggaaatcgtgcgtgaaaaattgttccgctatttgggcgaggaattgccttatgcgatgaacgtcgaagtggagcagtttgaagaggaagacggtttgaaccgcatctatatcgccgttttggtcgataaggaaagccaaaaggcaattttaatcggtaaaggcggagaacgtttgaagaaaatttccaccgaagcgcggttggatatggaaaaactgtttgataccaaagtatttttgaaggtctgggtcaaagtcaaatccggttgggcggacgacatccgcttcctgcgcgagctgggtttgtagtttttcttgctgaactttacgcaaatgccgtccgaacaggtttcagacggcattttgtttcaatcgggaatatctttgttaaaaacgggttgatattatctgtgcatattatagtggattaacaaaaaccagtacggcgttgcctcgccttagctcaaagagaacgattctctaaggtgctgaagcaccaagtgaatcggttccgtactatttgtactgtctgcggcttcgtcgccttgtcctgatttttgttaatccgagacctttgcaaaaatagtctgttaacgaaatttgacgcataaaaatgcgccaaaaaattttcaattgcctaaaaccttcctaatattgagcaaaaagtaggaaaaatcagaaaagttttgcattttgaaaatgagattgagcataaaattttagtaacctatgttattgcaaaggtctcaatccactataaagaccgtcgggcatctgcagccgtcattcccgcgcaggcgggaatctagtccgttcggtttcggtttttttggctagtgccgcaacattaaatttctagattcccactttcgtgggaatgacgcgattagagtttcaaaatttattctaaatagctgaaactcaacgcattggattcccgcctgcgcgggaatgacgaatttcaggttgctgtttttggttttctgctttttccaataaatgcccccaacctaaaatccgtcattcccgcgtaggcgggaatctagacattcaatgctaaggcaatttatcggaaatgactgaaactcaaaaaactggattcccactttcgtgggaatgacgaagtggaagttacccgaaacttaaaacaagcgaaaccgaacgaaccggattcccactttcgtgggaatgacgggatgcaggtttccgtatggatggattcgtcattcccgcgcaggcgggaatctaggtctgtcagtgcggaaacttatcaggtaaaacggtttcttgagattttgcgtcctggattcccactttcgtgggaatgacgcgattagagtttcaaaatttattctaaatagctgaaactcaacgcactggattcccgcctgcgcgggaatgacgaatttcaggtttctgctttttccaataaatgcccccaacctaaaatccgtcattcccgcgtaggcgggaatctagacattcaatgctaaggcaatttatcggaaatgactgaaactcaaaaaactggattcccactttcgtgggaatgacgaagtggaagttacccgaaacttaaaacaagcgaaaccgaacgaaccggattcccactttcgtgggaatgacgggatgcaggtttccgtatggatggattcgtcattcccgcgcaggcgggaatctaggtctgtcagtgcggaaacttatcaggtaaaacggtttcttgagattttgcgtcctggattcccactttcgtgggaatgacgcgattagagtttcaaaatttattctaaatagctgaaattcaatgaaccggattcccgcctgcgcgggaatgacgaagtggaagttacccgaaacttaaaacaagcgaaaccgaacgagccggattcccgcttgcgcgggaatgacgggattaagttttcaaaattcatcagaaattactgatttaatagcataaattttttagattatagtggattaacaaaaatcaggacaaggcgacgaagccgcagacagtacaaatagtacggaaccgattcacttggtgcttcagcaccttagagaatcgttctctttgagctaaggcgaggcaacgccgtactggtttttgttaatccactataagtcattccggcggcaatttttgttgctttaacgggataggcggttggcggttgcgataaaggcggcgactttggcggcatcttttttgcctttagacgcttccacaccgccggatacatcgaccgattccgctccggtgatgcggacggcttcgccgacgttttcaggggtcagcccgccggcaagcacccacggtttgcccgaatattccgccagcagcgtccagtcgaagcggtttccggtgccgccgtattccgaaggatggtaggcatcgaacagcagtgcctgagcgtcggggaagcgcgtggcggcgtttcggatgtctgatgccgtctgaacacgaatggctttgatataggggcggtggaactggcggcagaatgcgtcgtcttcgtcgccgtggaattggatgatgtgtatcggcacttcggcaaggatgcggcggatgttttgcgcgctttcgttgacgaaaagggcgacaacgctgacaaacggcggcagtgcggcggtgatttttttggcgcgggcaatatcgacggcccggctgctgccttggaaaaagaccagcccgacggcatccgcacctgccgctgcggcggcagctgcgtcttccggtgtggtgatgccgcagattttggtgcggattttcctcattcggtattcctttatttgggaaacggcgcgcttttgccgtttcagacggcattcccgatcagtcgattttgatgtattcgacagaaaggatttcaatttcctcacgcccttccggcgtgttcaaaaccacttcgtcgccttcgcgcgctttaatcagacaacgagccagcggcgaaatccaagaaattttgttttgcgcggtatcgatttcatcgatgccgacgattttgacggtttgctcgcgcccgtcgtcgcgcaacagtccgaccgtcgcgccgaaaaacacttggtcggtcgcttcgcgcaattcgggatcgacgacgacggcagcctccaaacgtttggtcaggaaacggatgcggcggtcgatttcgcgcatacggcgtttgccgtaaagatagtcgccgttttcgctgcggtcgccgttgcctgccgcccagttgacgatttggacgatttcggggcgttctttgttgaccagttgataaagctcgtctttcaatgcctgccatccggcgggcgtaatgtagtttttggtttcggtactcatattgtgtgcggatgaaacgggaaatgtgatgccgatatgggaaatgccgtctgaaaacccggcgttcggatttcagacggcatcgcggtttgggaagccttattcttcgtcgcccgcatcgctgatgctgatgctgtgttccatcctgctcgggtggattttcagaccgccgcagccggatttctcggcagacaggcggtcgaggtaggcatcatcgatgtcgccggtctgataaatgccgttgaaacaggacgaatcgaaggattcgattttcggattgagtgctttgacgacggcttccaaatcgcccaagtcttgaaatacgatgccgtccgcgccgatttcggcggcgatttccgccgcgctgcgcccgttggcaatcaactcttcgcgcgtgggcatatcaatgccgtacacattgggatagcgcacttcgggcgcggcggaggcgatatagactttgcgcgcgcccgccgcgcgtaccatttcgacgatttcgcggctggtcgtcccgcgcacgatggagtcgtccaccagcaacacgcttttgcctgcaaattcggtttccatcgggctgagtttttggcgcacggattttttgcgcgtcgcctgtccgggcataataaaggtgcggccgatatagcggtttttaatcaaaccctcgcggtagggtttgtcgagatggacggcaagctccatcgcgctggggcggctggtgtcgggaatgggcatcacgacatcgatgccgtccacgggcagctcgcgtttgattttttccgccagcgacacgcccatatccaagcgcgattggtaaacggatacgccgtcaatcacagagtcggggcgggcaaaataaacatattcaaaaaggcaggggctgagtttggcacggtcgctgcattggcgggcaatcattgtgccgtcaaagccgacaaataccgcttcgcccggccggatgtcgcgttccaaatcgtaggtaagcgcgttgaaggcgacggattcggaggcgacggcataggattttctgccttcgctgtcggtttgcgaacccaataccagcgggcggatgccgtaagggtcgcggaaggcgagcataccgtagcccgcaatcatggcaatcacaccgtatgcgccgcgcaccaggcggtggacttgggcaacggcgttgaaaatattgtcggcattgagccggtgcgggtcggcgtttttagagacttcgcggcgtaattcgtgcgcgaatacgttgagcaagacttcggaatcggagctggtgttgacgtggcgcaggtgtttgttacacacgttttcatacagttcggcagtgttggtgaggttgccgttgtgcgccaaaacgatgccgaacggcgagctgacgtagaaaggctgcgcctccgcgctgctgcctgcgttgcccgcagtaggataacggacgtgggcgatgccggcgttgccggtcaaatcgcgcatattgcgtgtgcggaacacttcgcgcaccatgcctttgcctttgtgcatatggaaggtaccgccttccgccgttgcaatgcccgccgcatcctgccccctgtgctgcaacatctgcaagccgtcgtacagaagctggttcacgggttcatgactgaccaaacctaatacgccgcacatatcgtcttctccgattcgaggtttaagggtaaaacggaattataaagtaaacggtggttttttgcctgaattgttgacaatatttgagcgaaggacagataggtgggtttatggagaataagatttatagtggattaaatttaaatcaggacaaggcgacgaagccgcagacagtacaaatagtacggcaaggcgaggcaacgccgtactggtttaaatttaatccactataatctgtgatatggctgaggaaaggaaaaaacatttcagacggcataaaagaggatgccgtctgaaatatccgtatggcaatcaatcgtcttccggagtttccgccgtgccgccgctatggttcaacacggcttcggaaagcgatacgaaaaacggcagtgtgtaagattgccgccattcttcggtatcgggcaggtcggtttttgaagcaagcatgaccagcagggtaacaatcaaaacgcctttcaatgcaccgaatacgccgcccaaaatgcggttggcaaagcccaaaccgaccgccgaaactgcgctggtcagcagcgaacggagcattttctggatcagacaggcaatgacgaacagggaaatgaacgacagagccaatgcaaacaggcggggttggaacgaggcaaaggcgaggtcggcgaaggaggcggcaaagagtttggcgaaaaagaaggaaaccacccatgccgccattgagcctgcctccgcaatcacgccgcgcatcgcggatagcacgatgcaggcggcgatgacggcggagacgaggaggtcggcaatggggaggctattcattcgttacctgaccggcgataccgtgtacgcgcaatttgttcaaatcgcgttcggcatcccttgcgtttttatagttgcttgatttgacgcggtaaactttgccgttgtcggtcataatttcggtgatggtcgaatcgatacccgccgccttcattttgcgctggaggcttaaggcgcgttctttttcggcataacctgcctgaatggcggcttttttaccggatttttccttctcggcggttttggtcttgtccgctttgtcggttttttgtgccgtttcgtgttttttgccgtccgaacggtctttttcggctgtttttttgctttcagccttgtcggcttttttcgcttcttttaccgcgctgtcggattttgccgtatccggtttggttttttcggcggcagttttcggtttgtcggcaactttttcggcggttttggtttctttggctttgggcttggctttggcagtgcgttccgctttttgcggttttgtttcggcagtgcgtttcggtttttcaaccgctaccgtatccgtactgtcggcagttgccggcactttttcggcagcgcgttgttttgcctgcttcggtgcggttttggcggtttctgcctgttgcagtttctcggatgcttccaaacctttgatgttgctgtcttcgaggcgctcgttaatcagcaccagcggcgcgcctacgttttcaggctcgctgatttcgctgtcggcggcagaaggcttgtcttcgcctgccaagtcctgcggtttgtcggcggcggatttcaaggcaggggtttgtgccgcacctgccgctttgttttctacgccgcttgtttcgccggcagtctgttcggcagggccggaactgagggcggctgccagcaggatgcaggaggcggcaaccaggcaacttgccgttacgaggcggcggcggttgcgccgtttgagttgttcgtaaccgctcaggacttcgttttgtttgttttcggacatagaagtttccttttaaagtaccgacatgacatcggcaacggtatgaaatgagccgaaaacgacgattctgtcgttctcgcccgcttttgaggctgccgcccggtatgcttcgcggacggcggcgaatgtttgtatgttttcgatgctgtgttcgtgcagtttgttttgcaggctctcgagcgtcatgccgcgcggtacatccaacggtgcgatataccactcgtcaaactggtctttaacggtttccaacacgccgtctatgtctttgtcggacaacatgctgaacacggcggtgcgtttttgcgcaaacgccaaattaatcaggctgcggcgcagggcgcgggcggcgtggggattgtgtccgacatccaaaacggtcagcggccggccgggcaggacttggaagcgtccgggattttcaaccagcaacaaaccgcgcttgatggcaccgatgtccaccggcaatttgtcgttcaagcattccaatacggtcagcgcgcaggcggcattggaaagctggtatgtgccgcgcaatgcggggaagggcagggcattgcggttgcgcgcggggtcgtctgaatgttgcggccggaagcggtagttccattggatgttttccatcgcgtgaaactcgaaatcgcgctgcaccatcagcagtttcgcgcctatggcttcggcgtgtgaaagcaacgatttgggcgcggggttttgaccgcagatggcgggtttgccgctacggaacacgcctgctttttcaaagccgacctgctcgaccgtatcgcccaaaaatgcctgatggtccaaatccacgctggtaaccaccgcgcaatcgccgtcaaacgcgttgaccgcgtccaagcggccgcccaagccgacttccaatatcatcacgtcaacctgttcgcgcatgaagatgtcgacagccgccaaggcattgaattcaaaataagtcagtgatatttcgccgcgcgcggcttcgatgcgctcgaaagaggcaataatcgtatcgtccgaaacgggttcggcgttgatggcgatgcgttcgttgtaacgcaataaatgcgggctggtcagcgtaccgattttgtagcccgcctgtttgtaaatctgtgtcaggtaggcacagaccgaacctttgccgttggttcccgcgacaacgacgacggggcattgcggctcgagcttcatgcgttttttcacttcgctcgtgcgctccaaacccatgtcgatcaaaccgccgctgtgggcggtttccaaatgcgagagccagtcttgtagtgttttcatgagtgtttcgttttcaaatgccgtctgaaatcagtctgatgtatcggtttcggcggtttttttcggctgccgccaaagtacccaaactttcagcttgcggtaggattctttgtccgtcatgtcgggcatgatgcattggcggacggttttgccgccggtgtcccattgtaagaataaggcataaggcgtaaccatactgctgcccgacagtgccgccgcctttgccgttttgtctttgccggatacgatttccgcctgtccgtcgcggtctatggtaatggcggttatggcatggcggtgtttcagattcgttatcctgagcgagtatgcgtaacttgccaccaaagccgccaaaccgaaccacatcatccggccgtaaaaccaagtcaggcagacggcaagggaggcggcgtgaagcgatacagtcaggatgttcaggatgcgggacggcctcaatgccgtctgaaaggcgcgcacagccttacatcatgttgtcgaacacgggggtaatgttcaattccgcttcttccatgttcaacactatatcgtggatttcgatgtcgaaaaattcccaaaacgccttcagccccatatcttgcggccatttatccttatcgatgtcccaacctgccagctccgcctcgaaaatctgccggtagcgttcgtcgaagtaggaaacgacggcttccggttcgtcgaactgcggaacgaggaagacggaacagttggcacgaagctgctctatggtcaggtcgggcatattttcgtcggtgcttttgagccattccaaaaagcgcgcggtcggcttgaggacgacggcggtgcggtcaacaaaatacatggttttctttctcaatcatcttgcggtgtcgggatatgctgtctgaacgttcggttttcagacggtatagcatcagtgggtcatgacctgttgcaggaactgcttggcgcgttcgtgtttcgggttggtaaaaaacgcttcgggcgtttcgtcttcgaggatttgccctttatcgacgaaaatcacgcggtcggcaacttcgcgggcaaaccccatttcgtgggttacgcacatcatcgtcatgccgctttctgccaagtctttcatcactttcaacacttcgccgaccatttcggggtcgagtgcggaggtcggttcgtcaaacaacattacgcgcggttccatcgccaaaccgcgtgcaatcgccacgcgttgctgctggccgccggaaagttgggaagggaaggcgtcttttttgtgtgccagtccgacgcgttccaaaagctccattgcctttttctccgcctgttccgcattttgcccttaaccttcatcggtgcgagggtaatgttttccaacacggtcaggtgcgggtagaggttgaagccttggaatacgaagccgacttcttcgcggattttgttcaaatcggttttggggtcggcaacgttgacaccgtccacccaaatctcgccgctttcgatgctttcaagctggttgacagtgcggatgagtgtggatttgccgctgcccgaaggcccgcagacgacgaccacttcgccttttttgatttccaagtttacgccgttgatgacgtgcaggtctttgaaatgtttgtgtacgtttttgaatttgatcatgtcttttctttcagacggcatttgccgttgcaggttgtcgttacgggagctccatatgatgaagcgtgtagcgtctgccgtcaaaaaaacggtcgttcggattggtcaggcaggctgcaagcggcagtatcaggggtaaaagcaggtatttcgtcatcggcttactcccttttcagacgaccttgcccgccagataattgctcaacgccacgtatttctctggcgcgatatgttcggcgcggtcttgcggattgatgccgactgcctgcaaatcatcgtcgcctgcaagctctttcagattgttgcgtatggttttgcggcgttggtggaaggcgagtttcacgagtttggcaaaatgctcgaaatcgtccgccttgccgatgcggtgtttcaccggaatcatacggacgacggcggaatccactttcggcgcagggtcgaacgattcgggcggtacgtcaatcagcatttccatatcgaaaaaatattgcagcatcacgcccaagcggccgtagtcgttgcttttcggcgcggcaaccatacgctcgaccacttctttttgcagcataaagtgcatatcgacgacatcgtccgccacctccgccagcttgaacaaaagcggtgtggaaatgttgtacgggaggttgccgacgattttctttttgcctgcgatgccgttgaaatcaaactgcaatacatcgccttcgtgaatcaccagtttatccgcaaacggcagcgttttcagacggcatacgatgtcgcggtcgatttcgacaacgtgcaggcggttcagctttttcgccaaaggttcggtaatcgccgccaaacccgggccgatttcaatcacgacatcatccgcctgcgggcgcacggcgttgacaatatcgctgataatccgcgtgtcctgcaaaaaattctgcccgaaacgcttgcgggctttgtgttctttcatcgtgtttccttttcggttgaaaccccgccctttagggcggtagaatcagactctatttgggaggggcgtaactctttccaaatcaggatggcacatagggcggtgctttatgtgtcgtcctgtgtgttgaaacataaatgtgtttacagtatccgtttgatgtcggcattgtaaccgaaaacggcagggcgtgataatgctgtttgaaggcttgccgtgtttggcggtttggtgcaaaaaccggctgtctgccgttttgcctgttggaggattgaacgtgtctgaaaatctgcttgaaatcgaaacccatcccttcgatcccgtgttgccgccgaaggctgctgtcatgatgatggggacgtttccgcccaaggaagacaaacgcgcgatgcagtttcattatccgaatttccaaaacgatatgtggcgcgtttatgggctggtgttttttaatgatgcggcgcatttccaaaggttgtctgaaaaagcgtttgatgccgagaaaatcaaggcgtttttgcacgaacgggggattgcgtcctgtccgaccgttttgaaggcggtacgtcagcacggcaatgcgtccgacaagtttttaaaggtagttgaaaccgtcgatttggcggcggtgttggcaaaaatacccgagtgccgccatatttgtacgacaggcggcaaggcgacggaaatcctgctcgatattcagggcggcggtatcaaaatgccgaaaacgggcgaaaccgtgccgtttccgtttgccggacgggatttgacgctgacgcgcctgccttcgacttcgcgcgcctatcctttgagtttggcgaaaaaagcggcggcgtatcgggcgttttttgaaatggcgggcttgtgtgaaaaacagttataattgccgacaatttcccgttcagacggcatgtttgcaaaaacggaaatgccgtctgaaaatttgaagcacaaggaagaatccgatgaagaactaccacgcgcccgacgagaagggctttttcggcgaacacggcgggctttatgtctccgaaaccctgattcccgccttgcaagagctggcggatgcctataaggcagcgaaaaacgatcctgaattttgggaagcgttccgccatgatttgaaacattatgtcggcaggcccagccccgtttaccacgccgcgcggttgtccgaacatctgggcggcgcgcaaatctggttgaagcgcgaagacttgaaccacaccggcgcgcacaaagtcaacaacaccatcggtcaggcactgttggcaaaacgcatgggtaaaaaacgcgtcatcgccgaaaccggcgcgggtcagcacggcgtggcgagtgccaccgttgccgcacgcttcggtatgacttgcgacgtgtatatgggcgcggacgacatccaacgccaaatgcccaacgtgttccgtatgaaattattgggtgcgaacgtggtcggtgtagaaagcggcagccgcacgctgaaagacgcgatgaacgaagccatgcgcgaatgggtcgcccgcgtggacgacacgttctacatcatcggtaccgccgccggccccgcgccgtatcccgaaatggtgcgcgatttccaatgcgtgattggcaacgaagctaaagcgcagatgcaggaagccatcggcagacagcccgacgttgccgttgcctgcgtgggcggcggatcgaacgccatcggtttgttccacccgtatatcggcgaagaaaacgtgcgcctcgtcggcgtggaggctggcggtttgggcgtgaacacccccgatcacgccgcgccgattacttcgggcgcaccgattggcgtattgcacggtttccgcagctatctgatgcaggacgaaaacggtcaggttttgggtacgcactctgtttccgcaggcttggattaccccggcatcggcccggaacacagccatctgcacgacatcaagcgcgtcgaatacactgttgccaaagacgacgaagcactcgaagcctttgacttgctctgccgcttcgagggcatcatccccgcgctcgaatccagccacgccgttgcttgggcggtgaaaaatgcgccgaaaatgggtaaagaccaagtgattttggtcaacctctcaggtcgtggcgacaaagacatcaataccgtcgcgaagctcaaagggattaaactgtaacctcgtccgtctgatatagtggattaacaaaaaccagtacggcgttgcctcgccttgccgtactatctgtactgtctgcggcttcgtcgccttgtcctgatttttgttaatccactataaaaatgccgtctgaagcctgagttcagacggcattttattttgctatgaatttagtattttagaaacgaatctgtattttaatttgtccggatttttgtttttccaattgttttccttttgtaatactgccatttacgtttaatgtaacattacggtacagtaacgcggcacctgctgaatattgctgttgattatctgctttatagacgaaggaattaccgcccacattcacgccgcctttgccataattggcaaagtaagctgcagataacaagggttttacggtaaggttgccgactttaaaccgataagcaaaatccagtccggccgttagtgttttcactgacatagaacttactttaacactgtcgttacccaacttgtaatctgcagatgacaggcggctgtaacggatccccgcactggggacaatctcgaattgattgattttcagcgtattgcccaaagtaaggccggtttggatgcttgctcggttaaagtttgctttttgctgcgtttgtaaccggcttctcaagctgcctgcaccaatatcgccggccacataccaagcatcatttaaataatacttaccataaaggttggcttgcacaaaagtatttttgccgctcgcctgatcaaaagtatgctgactgtcagagtaagtcaatacgccgcctatctgcatattttcggacaagctgcggtcaatgccgatttgtgtttgcgtgcgtttcgaactaaaccggcgatattgtgcggaagcataatcacgaccataaccggtgttcgacatccaaacactgtttttttcggcatcagcgcgtgatttttgtgcaatgtgccgtgttaatgaagcacctgtatccaacaagatagattgcgtgcttgccattgcgtcagataaagccgagttggtattggtgctgactgcatcggcttgcgcggcggcttgggcttgcagctgagtggcggcttgggctcgcggctgcgcggctcttggttgcaaactcactgtctcaactttttcatgaagttccgtattgtcttgaggctgtttgtctgatgtgtcaaccgattcggatacatcttcatcttccaacgcatccaaggggatttcttcataatcattttcatatttttcatgaagttccgtattgtcttgaggctgtttgtctgatgtgtcaactgattcagatacattttcatcttccaacgcatccaaggggatttcttcatagtcattttcataccagtccggattatgcaaggccctgggtgctgcgtaagctgacgaatcaaatgatggcgagggcggtgccggcagagtagatctgcgtccgcgacgtttcggacgattttgggaagctgccatataatcctgaggtgcggcacggcgttttcggcgttgcggctgggattgggctgcttgacggtgctcttcttcctcagcttttcgtttcgccgattctgccgcttctcgatctgtttcggctttttgttttgccgacaactctgctgcttggcgttccgcttcttgacgacgtgcaagttcggcggtctggcgagcttcttgctggcgttttgctgcttcggctgctgccctttgcttggcaagttcggcggttttgcgttcggtttccgctttttgtttgacggctaactctgcagcttttcgtgcttcttcctgttgacgcgcaagggctttttgttggcgtgccgccaatgcttgggcttcagctgcggctttttggtttgccgacaattctgccgctttgcgttctgcttcctggcgatgtgcaagttcggcagcttggcgttttgcctcttcggcttctgcttttcggcgcgcagccaatgcttgagcttcacgttcggcttctgccctttgttttgccaacaactctgccgctttgcgttcttcctgctgtcggcgcgcaagttctgcttgggcttgggcaatttccacattgttttgctgtaccgaacggtgtccgcggcgtttaggacggtcttgggaagctgccatataatcctgcggtgcggcacggcgtttgcggcgttgcggctgggattgggctgtttgacggcgttcctcttccccgaccctttgttttgccgacaactctgccgcttcgcgttctttttcatgccggcgtgcaagctctgcagcttggcgttttgcctcttcggcttctgcttttcggcgtaccgccaatgcttgagcctcacgttcggcttcgactttttgttttgccgacaactctgccgcttcgcgttctttttcatgtcgacgtgcaagttcggcgctgctgcgttcttgttctgctttttggcgggtcgccagctctcttgcttcgcgttcggcttctgctttttgttttgctaactctgccgatttacgctctgcttctgcttgctgacgcttcacttgctccgcttttgcttgctggcgttttgcttcttcggcttgatttgcctgcgggctaggcggtgcgacgacgatattttgaggcttggcaatttgtgcaccgtccgtttgtgttgccttttgtgcttgagaagccgtgtttgtggcaggagacggggccggtttgactcggcggcggttctcggcataaggattgtacaatcgggtaataccgttttctgttttgattgtataacgcaatgcccctaaatctacatggttattcgccaaggaaacagaaaggcgggagcggtcttgtacggatgatgcatcaaagagattcagcccttcctgattgggttcgcctgttttatcttgaacatggagctgataatgaccggatgcggattccttcacaagcactttatccccaagatttttcgccaggtgcgtcagataatgaaaatgcccgttaccggataaatgattgattttgagcgtgtggtatttatttgcactttgcgcatcggaggcattgttcaaatgaatatggctatccgccaatgacagattgtgtacttggctgtcgccggtcaaatgccatttgctatgttggtttaggctgacacggctgtttccttgcccttgaatttgcccccataatgcagccttgcccaagaccaatgccgcattctggttcagattcacattgccgttaatctgtgtcgctccaaagctgtttaaagccttatcggataagttgcctgtgttgcaggtaacgtaaccggtatagtccgagcgcacgcaaacctcatcgccgtttttgtaacccaaatttactttggcgttgtctgttgcggtgatgttggcggtgatgtcggatacatttctgccggaagagaatgatgcggattgattaaccgcaatttctgtggctttgaatgtgcggtttatccagtcgtcttcaaatacgacttcattgtttttggagaaatgtgcgtcttttcgggctgaagatttgttcacaaaatctcttgcgtgtggtgttggacgacctgataacaagacattgccttgagttacgcttatttttccgtttaaattagtgccgcctgttaacaagaaacggttttgcgcgcttttgccgttgaaattaaggtttaatgcaccgttatgtccttttccgttttcttcgccaaagaaaccgctaaaaccgctaatacgctgattgtttttgtggttcatcgcgtttttcttggcttcttcttgtgtgctgcccattaaaatccagtcgttattttccgtttgtccgttttcgggcatcggtgcgttcacgctgccgccggattttagggcgtaataacggtagtttttgaaataaagatctttgccttgtggaatcggtttcctagggcggtaatagtaataaccagcatcgtcatcatcattattttgaatataatgaatagagatggttttgggatcggtaatcaaagatttacccgttagcgtgattgtggaggcgtggcctgtgttgtggttgacaatgcgcgcgccttcatccacgttgcggatgtgttcaaaagtcaagtcattgccattggcatccaaacgaccgccacggaaaccgaaatataggttatcgggattaatctgatttgaactatttaataccaatgtaccgcgtccgctgacaatgccgacttgggagaaagcctggacttttttgtcggcatcggcttgttgattcagaataaccgtaccgtcgccgacttttaattgcccttggttaacgcctgtgccgtttatttctaatgtgcctttgccgatttttgccaatctgtcgccattcggatttttgacttgccaaacgacttttttgccgtcggcaacatcaatccccgcacctagccaagtgatgtcattatttatacctttgactgtgtaatcgcctttgaaaaacagaccgcccgcgccttggttgatgttttgatccaataccaaagtgccgttgttttcaaaggtaacattctgtccgttgtttgcatccctttcattgttggcaagccttaccgctgtcgaaccgatatggctgtttgtgcccgtggttttccaatgatgttctccattacctttgatggtgccggcgttatcgcgttgtttgatttcatctgcaaattcttttttatagatattccattcttgccaagagtttttttgatagcctgcccaataatcgtaagcacctaaaaagacccagcgtttttcttgtttatcataagcaaataatggtgaaccgctatcgcctaacacagcatagttagtcaatgcgttttgagataaaacttctttgagtttttctggggaatgatgttttgaattatcaccgaagccaatcaagccttcttgatttagattcgatgtgacattcacgtcttgataaggcgtacctgcaatggcataacgataagctcgtgaaagctctgtcatattgtagcggctgttatattcaaattgcgtacctgctccaactcgcacaaactcagaaaaacggtttttatctttataggtttcaacgccgccgcctgcactggttggtgcaataggtgcgacttctgttacgaatttattaaggcgtgccatgttgtagtcttcaagacgaccttgattaccgtgatgccaatttttatttggttcgtagtcattttgtgcaactgaacgatattcgttttcatcattgctaacatctaagtgcccattgtgatgcccgtaataagagatttcgtctccttttacatgtttgacgctgacggcatactggggatcgatgacggttaatgtacgtctgttgacatctgcaacgctaaaatcaatcatcggtacgttggataatgcgttgccgatgttttgaccttgtttgtttttcactgataaatcggttgcgccgacaaaaaatttgcctttgttttctgcaaagtcacggaatatttgataatcgacatcgtctctgaccaatgccgcttctgagtatggcgtaagggcataggcaagaaagatggataaggatatggcgttaattttaaaacgtttggttttcataaggttttaccgttttaagggtgataatgttttgtattttacgccggtttggtggtgttgactattttttgttgtgtaaatcattcattttggtgttttattgccaatttaaaaaaagaatcccgatgtttttatttccgcttcctttgttctgttattcaagcgaaggcgggaagccgattttcggggttcggttcttccgttaaatttctgcggctttttgtttttggattcccgcttttgcgggaatgacgggattttaggtttctgattttggttttctgtttttgagggaatgacgggatgtaggttttcttaaccctgagtcctagattcccgctttcgtggtaatgacgagatgggggttcgtgggaatgacgcggtgcaggtttccgtacggatggattcgtcattcccgcgcaggcgggaatctagaccttagaacaacagcaatattcaaagattatctgaaagtccgagattctggattcccactttcgtgggaatgacgggattttaggtttctgattttggttttctgtttttgtaggaatgatgaaattttgagttttaggaatttatcgggagcaacagaaaccgctctgccgtcattcccgcgcaggcgggaatctagaccttaaggcagcggcaatattcaaagattatctgaaagtccgagattctagattcccgctttcgcgggaatgacgaaaagtggtgggaatgacggttcagttgctacggttactgtcaggtttcggttatgttggaatttcgggaaacttatgaatcgtcattcccgcgcaggcgggaatctagaacgtggaatctaaagaaaccgttttacccgataagtttccgcaccgacagacctagattcccactttcgtgggaatgacgggattttaggtttctgattttggttttctgtttttgagggaatgacgggatgtaggttttcttaaccctgagtcctagattcccgctttcgtggtaataacgggatgtgggttcgtgggaatgacgatggaaagtttgccgttgtctcggataatactgaggcttttcgtttgcattcttatagtggtttaacaaaaaccagtacagcgttgcctcgccttgtcgtactgcttgtactgtctgcggcttcgtcgccttgtcctgatttaaatttaaaccactatatcattttcaaatcttgttatgacggtttttcggatttgctttattatccgtttatttttgaaatatctggggtggggagacgtgttccgtcgttggtttttgccgtgttgggttgtcggcgcggcggcttcgtttgcgctgccggtcgtgccgcattggctgttttggctggcggcttttgcggtttttgctgtgtttgcaaggcgttttgcgtttgccggtctgatgctgtgcgtgttggcgggcgcggcttacggcgtattcagaacggaagcggcactgtcttcgcaatggcgggcggaggcggtttcaggtgtgccgttgacggtggaagtggcggatatgccgaggtcggacgggcggcgcgtgcagtttgcggcaaaggctgtggacagcggtggtcggacgtttgatttgctgctgtcggactacaaacggcgcgaatgggcggtcgggagcagatggcggataacggcacgtgtgcaccccgtcgtcggcgaattgaacctgcgcggtttgaaccgtgaggcgtgggcattatccaacgggataggcggcgcggggacggtcggtgcggacagggttttgctgcatggcggaagcggttgggggattgcggtttggcgcagccgcatcagccgtaattggcagcaggcggatgcggacggcgggctttcagacggcatcgggctgatgcgcgcgttgagcgtgggcgaacagtcggcattgcgccccgaattgtggcaggcgttccgaccgttggggctgacgcatttggtcagtatttcgggtttgcacgttacgatggtggcggtgatgtttgcgtggctggcgaagcggctgcttgcctgttccccgcgccttcctgcccggccgcgcgtgtgggttttggcggcggggtgtgcaggcgcgctgttttacgcgctgcttgccggtttttccgtgccgacgcagcgcagcgttttgatgttggcggcgtttgcgtgggcttggcgcaggggaagattgtcggcgtgggcgacgtggtggcaggcgttggcggcagtgctgctgttcgaccctttggcggtcttgggtgtggggacttggctgtctttcggtttggtggcggccctgatatgggcgtgttcggggcgtttgcacgaagggaaacggcaaaccgccgtgcgcgggcagtgggcggcttcggtgttgtcgctggttttgctcggttatctgtttgcttcgctgcctttaatcagccctttggtcaatgcggtggcgattccgtggttttcttgggtattgacgccgctggcgttgctgggttcggtcgtgccgtttgcgcctttgcaacagttgggggcatttttggcggaatatactttgcggtttttggtgtggcttgccgatgtgtcgcccgagtttgccgttgccgccgcacctttgccgctgttggtgttggcggtgtgtgccgctttgctgttgctgctgccgcgcggcttgggtttgcgtccgtgggcggtgttgctgttggcagggtttgtgttttaccgttcacccggcgtgccggaaaatgaggttgcggttacggtttgggatgcggggcagggtttgtcggtgtcggttcagacggcaaatcatcatcttttgtttgacactggaactgcatcggcggcacagacggggattgtgccgagtttgaatgcggcgggtgtccgccgtttggacaagctggttctgtcgcatcacgacagcgaccacgacggcggttttcgggcggtgaggaatattcccgccggcgggatttatgccgggcagccggaattttatgagggggcgcggcattgtgcggaacagcgttggcaatgggacggcgtagatttcgagtttttgaggccgtctgaacgcaaaaacatcgatgataatgggaaaagttgtgttttgcgtgttgtggcgggcggtgcggcactgctggtaacgggcgatttggatacgaagggcgaggaaagcctggtcggcaagtatggaggcaacctgtacagccaggtgttggtgttggggcatcacggcagcaatacgtcctcgtcgggcgtgttcctcaatgccgtttcgcccgaatatgccgttgcttcaagcggttatgccaacgcctacaaacatccgaccgaagcggtgcagaaccgtgtccgcgcacacggcattaaactgctgcgtaccgatttgtcgggtgcgctgcaattcggcttgggacgcggcggcgtgaaggctcaacgtttgagagggtataaattctattggcagaaaaaaccgtttgagtgaggtttgaaacataaaatgccgtctgaaacggattcagacggcattttggcgttaacgccggttcgtgctggcaaggcatatcgtttgattttcagtgtgcgtcaaaaacagaaagggcgttgcggttaacggcagggagaaccgtttgaatgaacggaaaggtttgcgccagaaggggaaatgccgtctgaaagggcttcagacggcatccggacatcggtgcggaatcagtgccagtaacgccaccagggcatatcgtcagatcgccacggctgctttaagaacgggcttttcgggaagttggtttccaacacgcggcgcgtatcggcggcaagccggggcttgtccaacttcttgtaggcaagttccaatatggcgagcgattcttcgacatagcgtgtattttgatagctgccgataattttttgggcgcggttggcggcggcgatatatgcgccgcgtttcatgtagtaacgcgctaccgacatttcattgccgcccaaagcatcgaccagtttgaccatgcgtgcggtcgcatcggcggcgtatttgctgttcgggaagcgttggacgagttccgcaaaggcctgatacgcttcgcggttggctttcgggtcgcggtcggaccagtcttgcgaggccagcttgttcaagaaagattgatcttcgttgaacagtaccaaaccgcgcaggtatagcgcgtagtccatattcgggtgttgagggtgaaggcggcggaagcggtcaatggcggccagcgccttatccttctcatcatctttatagtaggcgtatgccgtatccagttgggattgctgggcatggcggctggtagggaagcgcgattccaagatttcgtataatttgacagctcgcgtataattgctgctgttcagctcgtcctgggcttcggcatagagtttttccacactccagtcttgggtaatctgggcatctttatctaccgtaccttgagtggcacaggcactcagtgccaaacctaatgaaaccgttaaaagaatttttttcatgcagaatacttcctttgataatgaatccgattatagcgacgattcagactttgcgtcagcttccgaaactgaaaaccgtatcggtctgaccgttccgctcgagcttgcaggcgggcggttggatgcggtattggcgaaacttctgcccgactactcgcgcagccgcctgacatcatggattaaagaaggcgcggttattgtaaacgataaaccttcgcaacccaaagacaaaatgataggcggcgagcaaatttgtgtaaccgtccgtccgagtgaggaaaatctggcgtttgttccagagcctatggctttggatattgtttacgaagacgataccgtcatcgtcgtcaacaaaccggccggactggtggtgcatccggcggcgggcaactggacggggacgctgctcaacggcctgttggcgcactgtcccgaattgagccaagtaccgcgcgcgggcatcgtacaccgtttggacaaggaaaccagcgggctgatggtggttgccaaaaccctgccggcgcaaaattccctcgtgaggcagcttcaagagcgcacggtcaaacgcatctaccgcgccgtcgccaacggcatcgtccccttcgacggtaaaatcgaaacccaaatcggacgcgatccgcacaaccgcctgaaaatggcagtcgtcaaattcggcggcaaaccagccgttacccacgtcaaagtgttggaacgctatcttacccacagctatatcgaatgctcgctcgaaacgggcaggacgcaccaaatccgcgtccatatgcgcgaggccaaccatccgcttgccgccgacccggtttacggcaacccgcgccatccgtgcggcgacacggtgaaagaagccgttaaaagtttgggtgcgcgtcaggcgttgcacgcctaccgcttgagtttcacccatccggaaagcggcgaaaccgtttcgtttgaagcaccgattccaaacgacatatatcatttgttatccgtcctccgtcttgaagccggtttggattcgtctttgagcaatgaagaagaatggcaggacaaattcggcgcggacgacgacgatgattggaacgaagacgactatgatgtcgaagtggtttatgtaagggagtgaggcggcttgaaaggcggggcgaacgcaggcagccgaatcggagcagccgggcaatcgtccccgccgatttcaaacaaaggccgtctgaagggaccgggcagaaaccgccggttttgtttgccccgttcagacggcattatgataaaaggcgtttagggttttttatgtttaccggctttggccgcccaataagttgccagcagcgagccggagatattgtgccacacgctgaacaatgcgcccggaacggcaacgaccggcgcggcggcaaagtgtgcggcggcaagcgcggcggccaggcccgagttttgcataccgacttcgatggtcagcgttttttgtgcatcataaggcaggccggtccatttggcggcaaagaagccgagcaggtagccgatgccgttgtggagtacgacaaccgcaaaaatcagcaggccgctttccataatcttgcctttgcttgccccaacaaccgcgccgataatcagcacgatggcggcaacggaaaccagcggcagcgcatcggtcagcttttcggttttactgcccaaaaccttatggacaatcaaacccaaaacaatggggagcaaaaccattttgacgatggacatcaacataccggccgcttggatttccagcatttcgccggcaagcatcaggaagatggcgggagtcagcaatggggaaatcagggtggaaacagacgtaacggcaaccgacaaagccacattgccacgcgccagataggtcatcacattggaagccgtaccgcccgggcagcagccgaccaaaatcacgccgaccgcgatttcggcaggcaggttcaacagtttggacagcagccaggcggttgccggcataatggcgaattgtgcgattacgccgatgatgacgactttgggatgtttgaacaaaatatcgaagtcggaaggtttgagcgtcaaacccataccgaacataataatgcccaacagccaaggaatataaggccccgcccatttgaaggtgtcgggcgcgaaaaaagcggcggcggcaaagagcgcggcccagagggaaaatgtttttccgataaagctgctgattttactgaggatattcataaataatgcgttgcgtgtttgtttttaagggaaggcaagcatacacgccttaaccttaatttgcaaaatgaccgtgcctaaacaatgccgtctgaaagtggagattggttttcagacggcatcgcccgagagatgtcggaaatggactttatccccattccttttcggttgaaacccgtctgtttatggcgatagaatctaatcggagggtagtctcgttcgggcaacacgcagtgcggtgcttgatgtgccgtcccctgttgaaacatataaagctcggagaaagtatagtggattaaatttaaaccagtacggcgttgcctcgccttgccgtactatttgtactgtctgcggcttcgtcgccttgtcctgatttaaatttaatccactatatataagggcatcattcctgcaccggcaagaatccgaacccgaacgtttgaaaacaatcccgaatctccgaattcccgcctgtgtgggaatgacgaaaaaacaagcattcatttgccccgaaggcagttaatcaaccctttccgccacacacctattccaatatccaatgaaaaccatcacagaaaccctaaatctcgccccgaaaggcaaaaacttcctgaccgccgattggcccgcgcccgccaatgtgaaaaccctgattaccacgcgcaacggcggcgtgagccaaggtgcgtatcagagtttgaacctcggtacgcacgtcggcgacaatcccgaagccgtgcgccgcaaccgcgaaatcgtgcaacagcaggtcggactgcccgttgcctacctcaatcaaatccacagcaccgtcgtcgtcaatgctgccgaagcgttgggaggcacacccgatgcggacgcttccgtagacgacacgggcaaggttgcctgtgccgtgatgaccgcagactgcctgcccgttctattttgcgacagggcgggtacggcggttgccgccgcacacgcgggctggcgcggtttggcgggcggcgtactgcaaaacaccatagccgcaatgaaggttccgcccgtcgaaatgatggcgtatctcggccccgccatcagtgcggatgcgtttgaagtcggacaggatgtgtttgatgcgttctgcacgcccatgcccgaagccgccaccgcatttgaaggcataggcagcggcaaattccttgccgacctttacgcgctcgcccgcctgattctgaagcgcgaaggcgtgggcggcgtatatggcggcacgcattgtacggttttggaacgggatactttcttttcctaccgccgcgacggagcgacagggcgtatggcgagcctgatttggctggacggcaatgccgtctgaacacgccgctgatataatctaccgactttgtgtttttgagaaaggcaagccatgaacaaactgtttcttactgccgcagtgctgatgctgggcgcgtgcggtttccacctgaaaggtgcagacggcatttctccgccgctgacctaccggagctggcacatcgaaggcggacaggcattgcggtttcctttggaaaccgcgctgtatcaggcttcgggcagggtggacgatgctgccggcgcgcagatgaccctgcgtatagacagcgtttcccaaaacaaggaaacctacaccgttacccgtgcggcagtcatcaacgaatatcttttgatattgacggttgaagcgcaggtattgaaacgcggcgagccggtcggtaaaccgatgaccgtgtccgtccgccgcgtccttgcttatgccgacaacgagatcttgggcaaacaggaagaggaagcggcattgtgggcggaaatgcggcaggatgccgccgaacagattgtccgccgcctgacctttctgaaggcggaatgacgtggcggcacatatcggacgcattgatacggacgcgcctttgaaacccctgtacgtcatccacggcgaggaagaactgttgcgtatcgaggcattggacgcattgagggcggcggcgaagaaacaaggttaccttaatcgggaagtttatacggcagacaatgccttcgattggaacgagctgctgcaaaccgcaggcagtgcgggtctgtttgccgatttgaagctgttggaactgcatatccctaacggcaagcccggcaaaaccggcggcgaggcgttgcaggattttgccgcccgattgccggaagatacggtaacgctggttttgctgcccaaactggagaaaacccagctccagtccaaatggtttgccgcattggcggcaaagggggaagtgtgggaagccaaaccggtcggcgcggcggctttgccccaatggatacgcggacggctggacaaaatcggtttgggtatcgaggcagacgcattggcactgtttgctgagcgcgtggaaggcaatctgttggcggcgcgtcaggaaatcgacaagctcgggctgctgtatccgaaagggcataccgtcaatatcgatgaggcgcaaaccgccgttgccaacgtcgcccgcttcgacgcgttccaactggcaggcgcgtggatgaagggcgatgtcctgcgcgtatgcaggcttttggacggattgcgggaagagggcgaagaaccggtgctgttgctgtgggcggttgccgaagacgtgcggacgctgatccggcttgctgccgccctgaagcaggggcagagcatccaatccgtccgcaacagcctcaggctttggggcgacaagcagacgctcgcaccgcttgcggtcaagcggatttccgtcgtccgcctgcttgacgcgctcaaaacctgcgcccaaatcgaccgaatcatcaaaggtgcggaagacggcgacgcatggacggtattcaaacggcttgtcgtgtcgctggcggaataaagcggtaatccccaaaatccgaaaatactgtaaaataccgttaatcctgaaaagtattcaccaatccgtccgaaaacatttcagacggcacgaccacctcaataaaggaacattaaccctatggacaataagaccaaactgcgcttgggcggcctgattttactgaccaccgccgttttaagcctcattatcgtattgattgtcgattcctggccgcttgccatcctgcttgcagccgtcattgtcgctgccgctgcgggcggttttgtttggacatcccgccgacagcaacgccagtttatcgaacgcctgaaaaaattcgacatcgatcccgaaaaaggcagaatcaacgaggcaaacctgcgccgtatgtaccacagcggcggacaacaccagaaagatgcgattaccctgatctgcctgtcgcaaaaatgttcggtggacgaggcgcacgctatgttcaaaaaacgcccgacacgtcaggaaatcaatcaaatggcggcaaaacagtcgcgcggtcagaaacgtccgcaccgttaaccgccgcaaggcatctttgcataaatgccgtctgaagcctgttggcgtttcagacggcatattctgattgaaaagatgatgacactgaaaaccgccccgctcaaacgccgctttgccgccatgctgtacgaaatgctgctggtcggtgcggcaacctgtttggcagcattgattgccggtattgccgccatttttctgaatcccgtttctatcgcggtttctgcattggtaacaagtatcctgataatgggagcatggtggctttatttccgcgccaactggcatggtcaggggcagaccttggcgatgaggacatggaaaatcggcttgtgcgaccttaacggcatacagccgtctttgcacctgctgcgcctgcgctttatttgggcgtgcatatttatcgtatttatccctatgttagcctatgccggattacgccacttcctcggcattccgcccaagggcgcggccggcgcggcattgatttggctgattttaccgtgggggttcgcactgctgaatcccgatcggcagtttctgtatgattttcttgcaggaacaagattggtggcggtcaaaggaaagccttaagcctttataccgcaaaggtttcaacctgaaaaaatgccgtctgaaagggctttcagacggaatttgcttatcggggaaaccgattattcgatattctgcacttgttcccgcatctgctcgattaagactttcagttcgaccgaggcttgggtgcattcggcggcaatggatttgctgcccaaagtgttggcttcgcggtttaattcctgcatcaggaagtccagccgtttgccgctgctgcctttgtgttcggtaacgatacggcgcacttcggcaatgtgggtgcgtagcggctgaactcttcgtcgatgtcggatttttggataaagagggcaaattcctgttgcaggcggtcgttgtcgatgctgccgaccgcttcgacgaggcgggcgcggattttttctttatgtgtttccaacagggtaggaaagagttcgcttaatgcatctatgatttcttccatagcctcaaggcgttgcagcaggtgctcgcctaatttcttaccttcccgcttgcgtgcggcagtaaagtcttttaacgctttttcggtcagttcggtaatgctttttgccaattcttccgtattttccctttggcttgccaatacgccggggaaacgcaggatgtcggcaacgcccagttttgccaaatcgtgatgcttgcggaggtctttgttgatttcggcaagctgtccgaccaagtcgcgattcagttccaaggactgactgccgttttccgcatcttgaatttggattttgcattcgactttgccgcgtgcgatatgggatgaaattttctcgcggataccgctttccaaatagcgcaaatcgtcgggcatcctgatttgaatatctagaaaacggtggttgaccgcacgcaggtcgagattgatgcgtttgctgccgcactctgccgccgcgttggcaaatccggtcatgctgtggatgtggatatttccgctgctcatgtcgttctccgaagcccgttaaaatggaatcaatatatcacatctgtatggcggcaagcgttttcgggtgtgaaaaattgaagattttgcagcggcagattggaatcacgcgcttttgttgctgcaaggaagggaaatgtatagtggattaaccaaaaccagtacggcgttgcctcgccttagctcaaagagaacgattctctaaggtgctgaagcaccaagtgaatcggttccgtacgatttgtactgtctgcggcttcgccgccttgtcctgatttttgttaatccactatatcaattccgccaatctgtcggaaaagcagctgatgcggcagtgtctggtgcatgtctgctttttgatttcggcaattgcaacggcgtggacggataaaatcgtgtacagcacgacgcacaaaccgcattgatgtttaccaaataaaatacccgacaaaacaatttgtcgggtattttattgcgtatatttcaaaccgcttcggcttcttcggtcaggaaaccacgcagtttctgcatggcttttgcttcgatttggcggatgcgttcggcagatacgccgtattcggcggcaagctggtgcagcgtcagcccgccgtcgtcttgaagccagcggctttccacaatacggcggctcctgtcatccagttgcgccaaagcgttttgtaaaccttctgtttgcagggcgtaatgcgcctgtttcgatagttgtcggctcggttcggaatcgtggtcggcaagccagtcgatgggggcgaaactatcctcgtcgtcgctgttgtctgccatgatggcgatgtcgtgtcccgtcattcgctgttccatttccagaacttcggaaagtttgacacccaaatcgtcggcgatgtcttgtgcctctttgggagacagggcgttgaggtttttacgcatgctgcgcaggttgaaaaacagcttgcgttgcggtttggtggtggcaacgcgaaccaaacgccagtttctcaaaataaactcgtggatttcggctttaatccagtgtacggcaaatgaaaacagacgcgcgcctctaccgggctcgtagcgtttgaccgccttcatcagtccgatattgccttcctgaatcaggtctgcctgattcagcccgtagccgtcatagccgcgcgcgatggaaacgacgacgcgcaggtgggacaggatgagttgtttggcggcgttgaggtcgcctttgtgttggcgttcggcaaggcgtgtttcttcctcttgggtcagcatgggaattctgttgacggtgtggatgtattgttcgaggctgccgttgccgctttggatggcgggtaatgcgaaagcgttattcatttgggacatttcctttcggctgaaactgcgtatcggcggtttgctgtgttgggatgcagtatatcactgcttggcttgtattttgtatatttggcaggagatatgcgctaaggtttgaaagacaggaaaaattttgtaaggcaagtttgattgattttgtaaacctgatggctcaattcgattttggaattatattacatacgtggttgtatgtaaatagccgttttgaaaaaagacagcccgtccggacgggctgtgcaggtatcagtgttctttgtttcggaagatgaaaagaatcagtgcggctagggccaatatgcccatcaaccaccatgaactgccggttttcatatagggcgtttcgccgacatagcctttgatgtgtccttccaatacggtttccgtatcgggttgggcttgggcgatgatgttgcctttgggggagatgatggcggttgcgccggtgttggtggcgcggaccatatagcgtccgagttccatagcccgcgcctgcgattgttggaggtgctggtacatggcgttggattttccgtaccacgccatattgctggcattggcaagcagggtggcatcttttgcggcggcaatcagttcgtcgccgaatccgtcttcgtaacagatgttgaaggcgattttttggtttttcatcagcagggcggattgcttgccgccgcctttgcggaagtcggaaaggggcatatccatcattttgtaaagcggcgtggtcaggaaaggcagcggtttgtattcgccgaaggggacgaggtggtttttggcgtagtaggggataccgtcctgattgttttcctgataaccggtcaggttgatgacggcgttttcgtaaccgttgccgtccgaagtgtattggctgatgccgacggcgagcgcgctgccgttgttttgcgcctgttcggcaaatttcgccagtatgttttccggcaggttttggcgcataacggggatggcggtttcgggcaggatgacgatgtcggcggtggttttgccgacttgttcgtaatatttctgtatggtcgggataacttggtcttcacgccatttgagggtttggtcgatgttgccttgaagcagggcgacggtgctgcggctgccgtcggggcgggtgaagtcggtttgtcgggcggtgtagcctgcggcaagcagggcggcaatcaggataatcggaagcaggcgtttgcccgaacgtgcggtgttattactcgccaaaaccagccagacaccgagaaaggcggttgccagtgtaaccatgtggatgccgcccaatggggcaaagccggcgagcgggctgtccggggtgatttgggagtagccgattgcgccccagccgaatccggtcaggaaacgttcgcgggcaaactcggtcagcgtccacaggatgggcagtaccaaaccgatttttatgccccgaggcagggtaaattttttccacagccagaaacacagtgccggataaagggcaaggtaggcggggagtaggaaggtcagcggtacggcatagaggtcgggcaggccggaaacgtcgtgcagggcggtgtgtatccagtagaactgtgtcgtgtatgcggtcaggccgaacaggtaggcggaagagacagcaaaacgcggacgcagttcgatgaggcggacgaaggcaccgaaaatcaagggcatcagccaaaagtggtagtagggtgcgaaggtaaagggggtggcggcggcaaaaaggatgagcaaaggccagtagagggcggggtgctgccagtatttgtccagtttggaaaccatattcatctgtctgttcggaagataccgtctgaacatctttcaaacggcatcggtatttgaaaaaggaatcaatgcctgccgaaacgattcatcagcggcaaggcgggggcgcaggcaatcgaaccggaaagcagcccgacaacgaggttggcgaagtactccgcccagccagcgtcccagtgttgcgcgtgcaggaaatcgtgcagaaggccgaggttgtgggcgaccagtacgccgccgataagaaacatggcaagcgtgccgaccacgctcaaaccgcgcataaagcaaggcataaaggcagtcagcatttgccccaaactgcgcgaaaaggtttgtgggcggcgcatcagcagcatgcctaagtcgtcgagtttgacgatgacggcaacgattccgtacaccaaaacagtcatgccgatgccgattgccgccattacgagcatgcgcgtcatgtcggtgcagaaacttgtgcagcagcttttctacgccttcaaagcacagataaatgccgcctgccgtcaaaagcggcgtaatgagttgcggcaggaaggcggaaagcagcagggccgcaggcaccaaaaccggcttgttggaaaaagaacctttcgccatcgaccaaacaatcggcaactcgcgttctgccgatacgcccgtaacccggttggcattgggtgccaaatcgtcgccgaccacgccggcggttttctttgcggcggctttggtcatcagggcaacatcgtccaaaacggcggtgatgtcgtccggcagggtaaatagtgaggcaaatgccattaaagaatcctgaaatgcggcgcaaagtccgacattatataggagaacgcggatttgggcggtttcaggcggcatgaaacaggaaaatgccgtctgaacgctgtggcggacgtgaagtaaagtttcgtgaaaagaaaataccgtgttacagtctttcgattttaatttcatgaattttaagggagaatcgttagcgtggattggatgggcagtctgttcctgccgggtggcgcactgttgtttctgagcgtggtttcgaccactttgtccgcacgtttgggaatgcctttgctgctggtttctcctgccaacgtgttggacagggcggcggaagccttggcgattgcggcgttcctgatgctggtcgcgcgtccgtcggcagtgttcggcggtttgtggaaattcaattacagcctgcgtgaaaaggcgtatagccgaatagaaatgcagtccgacaccgtgcttcaggcggggatttggcgtggtacatcctgcccgacggcaaggtcgatatagtgaattaacaaaaatcaggacaaggcggcgagccgcagacagtacaaatagtacggaaccgattcacttggtgcttcagcaccttagagaatcgttctctttgagctaaggcgaggcaacgccgtactggtttaaatttagttcactataaaatggcgaaatactttaccgagacgggtattagcgtccgtgagcattttgatttcttcggtgagtttgtcgtttcgccggcagcacgttcgggtgatttggcacttacttacggtttgaggctggaagcgggcgaagagggtttgagccttgccgagcttttcgataagcgttccgatagtcaggagccggtcgagggcggccgtattgacatcggcggctttatgctgaccgcaaaggaggttgacggtggcggcaatatcgggtctatggggctgaaagtgctgcgttagaaaggtttgatttgaatgccgtctgaagccggattgccggtttcagacggcattttgtctgtttagttttttttgctttttgcctgttttacgtctttttcggtaacgcttccgccgccgttgtcaaaggcgttcatgatataagtggcgacggcggcaatgtccgcatcgctgatggcggttgcgggcatgaatccgttgtaggttttgccgttgactttgattgtaccgttgatgcctttgaccatgctgtgcagcagcacctgcggttttttcatgatgaagtcggagcggtagagcggcggaaacatggttccgcggccttcgccctttttgccgtggcaggcgacgcagttggattcgtacactttttgcccttttgtcatgatgctgttgtcggcggcagaagcggcggcgcagaagcagcccaagacgagggcggtcggcagtcgggttgtgttcattggtgtttccttcatgtttgaaaccttgttgttgattttgcgtagcgggtgaaagatttttttgccgaatcagtagtatagtggattaacaaaaatcaggataaggcgacgaagccgcagacagtacaaatagtacggcaaggcgaggcaacgccgtactggtttaaatttaatccactataaggttgcacttgatgttgttgtccagcatagatgccatcatacgctaaagtagcgggaaaatgccgtctgaacacggcgttcagacggcattttagacatgggtcaaacagtttcaacgccagctgccaaggttttcttcggcaagtgcgacgagtgcatctatccagtcggggttgtcgttgaggcaggggatgtagcggtagcttttgccgcctgcttcataaaactgttcccgccccatcagggcgatttcttccatggtttccaaacagtctgccaaaaagcccgggcaaaatacgtccagctcggttaccccctgtttgggcagtttgccgaacaaatcctgcgtgctcggtgtaacccattttgccctgccgaattggctttggaacgatacgacatattggtcttcggtcagttccagtgcttcggcaagcagtttggcggtgtggcggcactcgtcgggataggggtcgccgaggtcgtggtgcttctgcggtacgccgtgaaaactcaacatcagttttttcccgcgcccgtgttccgcccaatatcggaggatgtggtttttcatcgcatcaatgtagccggtatcgtcataaaagcgcgaaacggtgcggacgctcatttggttccgttgcagcagtaattgttcgcacaccttatctactgccgctccgctgctggaagcggcatattgcgggtacatcgggatgaccagcagtctgcccgcgccttgcgccttcagttccgacaatacgtctgccaccgaaggattgccgtaggtcatggcgtggcggacgatgaggtcgggcatacgtttggcaagcgcggcagcttggcgtgctgtgtaaacttctaagggcgaaccttccttaaaccagattttttcataggcgtgcgcgctttttttggggcggagcgtcagtaccagaccatgcagaatgggataccacagccatttgggcagttcgacgacgcgccggtcggtcagaaaggacttcagataaggtcgtaccgcctgcgcggtcggcgcgtcgggcgtgccgaggttcaacagcaaaacggcggtacggttttgttgcgtataggaaagggagggttctggaaagaatggaagcatgatcggtttctgaaaaatagtgcgggtagggtaaagcggcaaaatgccgtctgaagcggcttcagacggcattgcagggaatcagtctgtgccgcgtgcgcggttttcgtggaatcgcgcctgccagtcggcaaatttgccttgttcgacggcttcgcgcatttccgccataatgacttggtagaaatgcagattgtggatggtgttcaactgtgcgcccaagatttcgccggtgcggtgcagatggtgcaggtaggcgcggctgaagttttggcaggcgtagcaggtgcagctttcgtctatcggacgcttgtcgagcttgtgtttggcgtttttgattttcaaatcgccgaaacgggtaaacagccagccgttgcgtgcattgcgggtgggcatcacgcagtcgaacatatcgatgccgtgtgccacgccgtacacgaggtcttccggcgtgcctacgcccatcaggtaatgcggcttgtgttccggcagaatcggaccgacggcgcgcagcatacggtacatttcgggcttgggttcgccgacggacaaaccgccgacggcaaggccgggaaaatcaaactgttccaaaccgcgcagcgattcttcgcgcaaatcctcatacatcgcgccttgcacgatgccgaacagcgcgttcgggtttttcaaatcttcaaaggcttttttgctccgttccgcccagcgcaggctcatttgcagcgattttcgcgcctgttcgcgcgtcgcctcgcccggcgtgcattcgtccaactgcatcgcgatatccgagttcaaaaccgtttggattttcatggaaatttcaggcgataaaaacagcttgtcgccgttaatcgggcttttgaacgtacagccttcttccgtcagcttgcgcatatccgacaaagaaaaaacctgaaaaccgcccgagtcggtcagaatcggtttgtcccagccgataaaaccgtgcaggccgccgaattgcccgataacttccaaacccggacgcagccacaaatgataagtgttgcccaaaataatttgtgccttgatatcgtgcaggttttgcgggttcatcgccttaaccgaaccgtaagtaccgacaggcataaataccggcgtttcaattttgccgtggttcaactccagcgtgccgcgtcgggcgagaccgtcttttttgtgtaaggtaaatttaagcataagattgaatgtcagttgggcgacaggggtcgaaatatattttaaaagacggcattataaatgatttcccacggtttttcagacgacatccccaaatcttgccgcaatgttgcataaagaaacgcacatacctcttgcaaaaattaaaacgacccgataaaatgcaaaaattctttgaaggcacgtagctcagttggttagagcaccaccttgacatggtgggggtcgttggttcgaatccaatcgtgcctaccaaattcccataacggcatttatgccgttattttttaatctttcggagcgtttgatgttgaatattaccttgccggacggctcagtccgccaatacgaatcccccgttaccgtggctcaaattgctgcgtctatcggtgccggtttggcgaaggcgacggtggcaggcagggtaaacggcaaattggtcgatgcgtgcgacccgattgttgaagattctgctgttcaaatcattactccgaaagatcaggaaggcatcgaaatcatccgccattcctgcgcgcatcttgtcgggcatgccgtcaagcaactctatcctaatgcaaaaatggttatcggccccgtcattgaagagggcttttattacgacatcgccacggaaaaaccgtttacaccggaagatgttgccgccattgaagcgcgtatgaaagaattgattgcccaagactatgatgtggtcaaaatcatgactccgcgtgcggaggcgattaaaatttttcaagagcgcggcgaagaatacaaactgcgcctgattgacgatatgcccgaagtggaagcgatggggatgtatcatcaccaggaatatgtcgatatgtgccgcggcccgcacgttccgaatacccgtttcctgaaaaacttcaaactgaccaagttggcgggcgcatactggcgcggcgacagcaataatgaaatgctgcaacgcatatacggtacggcttgggcgacaaaagacgaattaaaagcctatattcaacgtatcgaagaagccgaaaagcgcgaccaccgcaaacttggcaagcaattggatctgttccacctgcaagacgaagcgccgggcatggtgttttggcatcctaaaggctgggctttgtggcaagtgattgaacagcatatgcgtaaagagctgaacgccgccggttataaagaggtcaaaacgcctcaaatcatggataaaaccttttgggaaaaatccggccattgggacaactacaaagataatatgttcgtaaccagttcggaaaaacgcgaatatgcggttaaaccgatgaactgtccgggtcatgttcaaatttttaacaacggtttgcgttcgtatcgagatttgccgatgcgtttggcggaattcggttcttgccaccgcaatgagccgagcggtgcgctgcacggtctgatgcgggttcgcggttttgtgcaggatgatgcgcatattttctgtaccgaagatcaaatcgtcagcgaggctcgtgcgttcaatgaattgttgattcgcatctacaaacagttcggtttccatgatgtatccgtcaagctttctcttcgccctgaaaaacgcgcaggttcagatgacgtgtgggataaggcagagcagggtttgcgcgaggcattgactgcctgcggcgtggaatggggcgaattgccgggcgagggtgcgttttacgggcctaaaatcgaatatcatgtcagagatgccttgggtcgttcttggcaatgcggtacattacaactggatttcgtattgccggagcgtttgaatgccgaatatgtaactgaaaacaacgaccgtgcgcgtcctgttatgttgcatcgcgccattttaggttctttggagcggtttatcggcattctgattgagaaccatgcaggctcattcccgttatggttggctccggttcaattggtaattatgaatattaccgaaaatcaggcagattattgtcgggaagtggctgccaaattgcaggcggcaggattccgcgccgagttggatttgcgtaacgaaaaaatcggttacaaaatccgcgacaacagccaataccgtttcccttatcaaatcgttgtcggcgataaggagaagcaggaaaacaaagtggcggtacgccgcaaagcagaagatttgggttctttggatttggatgatttcattgcgcaattgcagcaagaaatcactgatgccctcgtcaatcattaatttttataggagtattcatcatcgctcaagaacgcgaagcacgaatcaacggcgaaattaccgccaaagaagtgcgtttaatcagtgagtcaggcgaacagcttggtgtcgtttcagttcgtgaagctttggctatggccgaagggcaggatgtcgatttggtagagatttccccaactgctaaaccgcctgtgtgcaaactgatggattacggtaaatacaaataccagcaggccaagaaacgcgacgaagccaagaaaaaccaaaagcaggtgcaaatcaaggaaatcaaattccgtccgggtacggatgagggcgattatcaaatcaagatgcgcaacattaaccgcttccttgccgacggcgataaagtcaaagtgacattgcgtttccgcggccgtgaaatggctcaccagcaactcggcgcgcaacttttggaacgtgtaaaagaagatttggctgaagtggcgcaaatcgagtcctttcccaaaatggaaggtcgccaaatggtgatgatgattgcgccgaagaaaaaataaagctataattctccgcttactccgattgccgcttcggagtaagttttcaattgcggcaaaaaaccgtgtcattgtgggttcaagtgtttgaaaccgatgttttaaaaccccctaatgccttatccgataacgaatggagttttcccatgcctaaaatgaaaaccaagtctagcgcgaaaaaacgctttaaagtactgggtaacggcggtgtgaaacgcgctcatgcgttcaaacgccacatcttgactaaaaagaccaccaaaaacaaacgccaactgcgcggtacctctatggtaaatgatcgcgatttggcttctgttgctaaaatgttaccctacgcttaaggagtttagaatatgccacgcgtaaaacgcggtgttaccgctcgtgcccgtcaccaaaaaatcttcgcgttagccaaaggctaccgcggccgtcgtaaaaacgtttaccgcgttgccaagcaggcggtaatgaaagccggtcaatacgcgtaccgtgaccgccgccaacgcaaacgccaattccgtcaattgtggattgtccgtatcaatgcaggtacgcgtgaaaacgggttgtcttacagcaaatttatgaacggtctgaaacgcgcctctattgaaatcgaccgcaaagtattggctgatttggccgtgttcgataaagccgcttttgcacaattggttgaaaaagccaaagctgctttggctgcttaatccaaaaaattgaaaaggaagctgcggcttccttttttctttgtttgcagaaattctatgtgattgattttctttctttaaagtctatttttttaaataaatttgcgttaaaatatagtggattaaatttaaatcaggacaaggcgacgaagccgcagacagtacagatagtacggcaaggcgaggcaacgccgtactggtttaaatttaatccactatacagaaaatttatccaatggattgaccgtgaagaaaataaggtcgtctgaagagtctgatatgtcaggctatacaggcggcctcgttgtttcaggtggtatatcattaattgacagacttgatattatggaaaatgtaaaccgcatcgttgcagaaggcattgccgcagtagaagctgcgcaagacttcaacgctctagaacaaatcaaagcccgttatcttggtaaaaccggcgagttgaccggacttctgaaaactttggggcaaatgtcgcctgaagagcgcaaaaccataggtgcgcatatcaatgaatgcaaaaaccggtttcagacggcttttaatgccaaacgcgaagccctcaacgaagtcaagctgcaagcccgacttgccgccgaagccctcgatattaccctgcccggacgcgctcaggaaggcggcagcctgcatcccgtaaccctgaccttgcaacgtgtggtcgaactctttcacggaatgggtttcgaagtggcggacgggcctgaaatcgaagacgattttcacaatttccaagccctgaacatccctgcaaaccatcctgcccgtgcgatgcaggatacgttttacgttgaaaacggcgatgttttgcgtacgcacacttccccgattcaaatccgctatatgctcgataaaaaagagccgcccatccgcattatcgcccccggccgcgtttaccgtgtggacagcgatgccacgcactcgcctatgttccatcaggcggaaggtttgtgggtagaagagggcgtaacttttgccgacttaaaagcagtgttcacggattttatccgtcgcttctttgaacgcgatgatttgcaagtacgtttccgcccgtctttcttcccgttcaccgaaccgtctgccgaaatcgacattatgggcgaaaacggcaaatggctggaagtaggcggttgcggtatggtacatcctaacgtgttgaaaaacgtcaatatcgaccctgaaaaatataccggtttcgcctttggtattggtctcgaccgcttcgctatgctgcgttacaacgtgaacgacttgcgcctgttcttcgataatgatttgaactttttgaagcagtttgcgaaatgatcgtgcagactgcctgaatatggaaaagcagcctactcttggttttcaggctgcttaggaaaattcaaatgtaagatataaaacatttgatattttgttgtgaaattacattcctaattttgtttaaagaggcataatttattgctttgtagagattatatagttaatttgggtttggttctatgatgataggggcttctttgttttcgagtgcagggattgcagaaacctacttgcataatgcgggtattaagattatagctgcaaatgaattggtgccagaacgtgctaatttatataaagctctatatcccgaaagtaaaatgattataggtgatatacttcatgaggaagtgtttcaaaatttaatacagagcgtgccgaatcgattagattttttaattgcttctcctccttgtcaaggcatgagtgttgcagggaaaaatcgtaacattcaagagatggctaatgataaacgtaatcatttaatattcagagtaatcgaatttattttattaaaacgcccaacttttgttttgattgaaaatgttccattttttttaaaaattaagttaccttataaggggacattacaaacagtagaagtaattttgcaagatttatttggttgcgaatattatattcaaactcatatttttgattctgccgattatggtgttgcacaacatcgtaaacgagctattattcgtatgaataaacattcaactatttggggaatgccggaaaaagttacaaaaaccatttctgttcgtgatgctattagttttttgcctagtattgagtctggacaaaagtctaatgtgaaatggcattttgcacgtacacatgctccggagcacattatatggctaaaaaatacgccaacaggacgatctgcttttgataatatagaacattatccaaagaaaaaaaatggtgaaaaaattaaaagttataatacaacttatcgccgtatggagtgggatgctcctgccccaactattactattcgtaatgacgctatcagttcacaattaaatgttcatcctggacggtctatgcctgatggaacatattcagatgcaagagttttaacaccattagagttaatgcttttaacatcattacctattgattggaatattcccgacgatacatcagaattattaattcggcaatgtattggtgaatctattcctccattgttaattaaaaaaattgtagagagaataggaaaatagatatgacaactgcgcgctgggtaatagataaacatttacagaattttcatattttatgtaaatttgcaggtattttgaaaacaaattcttttatatctgtagaggataaagctaagttatctgaaaaattggaaaaactagatttataccatagacgaaatacaggtaaatcattggatgctactactcataaaataaaagaattatcattctatatgtttggttatcgtgatgtgtgtgggcaagttacacagaaattcctgttcagtccattgggtaatttatttttgaaacacttggataataatgaatatattcaaaaaatttttcttactatgttgtgggcgataccatttcctcatccgtacattaagactgatgaaagtattcaattatatcccatgagactaatatttaagttgttatctgatgaaagattggattgtaaactattttcttatgaatatatctatttaatttcatttgtgaaatctgctgatcagaatagctatgaaaaattagtacaagacattttggtgttacgaacatgtgctgaagtaaaaattaaacatcaattaactgcggaaaatagtcgtagtcatgcttatgtaaatgcagcacatgagtgggaatcttatttttcaaaaacattgactgatgcaggtgttttgcaaaaaacagatggtaaaattatttgccgtctaaagcatggtaagaccgaaacatatcgtaaagtaacatcaagtgagttttcgattcctaagcaacttcaggaatttgtgaaaaaattgcaaagtgcttattcgttttcagaaatgccattaaatctgaacgatagtgatcgtttgaaaattgatgtcattaaggaaatttatagcttctatccaaaagagttattggaggaaattggtgagcttaaggatgaagcagcatatgaattattgcacttacctaggttgattgaacaatatgcagataataataatggaacagaggcatatctatttgaagatgttctagaaatggggttcaatatgttttataacgtagaagctaaaaaaattggtggaccaggtaatacggatttagagtgcttatatattacgcaaaagagaaaatttgcagtggaggcaaaatcaactaaaaataagttatcaggtattaattcaggaagattggaagatcataaaaataaaattaaggccatttacacaattgttgtcacaccacgttatgtccctgccgtattatccgatattcgtaattgcccaattgtaattattcgtgccaatacatttgctgaatttttatataattgtttgattaatcgctccagtattccagagattgattatcggtattttgatgaaattattattaaaaatcttggaaaagatattagttcagaaatttccaatttgactatgcaacagtttgcaagtaacaccacaatggaagcgtatagtacatgataactatttcaaatgaagataacatgatcttaatgtctcggtatcctgacaagtattttgatttggcaattgtagatcctccttatgggattttgaataaaactaaacgtggtggtgattataaattcaatatgaatgaatactcacaatgggatattaagccagaccaaacttactttaatgaattatttcgcgtgtcaaaaaatcaaattatttggggtgggaattattttggcgagttatggttgagaagtgaatataataaaggatttattatttgggataagaatcaaccagagacattaaataatttttctatggcggaaatggcttggtcgtcattcgataggccatctaaaattttccggtttagtgtgcggaaaaatcgtaataaaactcacccaacacaaaaaccagtcgaattatatcagtggttgttaaaaatgtatgcaaagcagggtgataagattttagatacacatttaggaagtggaactcttgctattgcatgctgcattgcacagtttgatttgacagcttgtgaaatcaattccgattattaccaacaatcgattgagaaaataaaaaataatttacctgaagctagaatcagttttgggcatccaggttattgtattattgaataacttaaaaatatagagaaattaaccatgcaattctcctactcatggctgaaaacccaagccgataccgaactttcctccgataagctggaacatctgttaacgatgtccggcttggaagtggaagaggctgaaactgccgcgcctgcgtttgcgggcgtggtgattgccgaagtgaaatccgttgaaaaacatccggatgcagaccgtttgaacgttacccgagttgatgcgggtacgggcgggttggtgcagattgtgtgcggtgcgccgaatgtgaaagcgggcatcaaagtgccgtgttcgctgccgggtgccgttttgccgggtaatttcaaaatcaagccgaccaaaatgcgcggcgaggtgtcggacgggatgttgtgttccaccgacgaactcggtctgcccgacgacggtgtgaacggcctgcacattctgcctgaagatgcgcccgtcggtaccaatatccgcgaatacttggatttggacgatacgctgtttacgttgaaaattacgcctaaccgcgccgactgcttgagcatcaaaggcattgcgcgcgaagtgtccgcattgacggggtgcgcgttcaggcagcccgaaatccataccgcgccgatcacgggcagtcgaaaacagcccgtgcagattaacgcgcctgccgattgcggccgttttatcagccgtgtgattgaaaacgtgaacgcgcgcgctactacgccggattggatgaaacaacgtttggagcgcagcggcatccgcagtatttccgcgctggtggacatcggcaattatgtgatgctggaaatcggtcagccgatgcacgtttttgatgccgacaaactttccggcagcctgcacatccgccgcgcgcgcgaaggggaaacgctggaatgcctgaacgagaaaaccgtttccctgtctgaaaacacgctggtcgtggcggacgaaaaaggcgtgttgagtttggcgggcttaatgggcggcgcggcgagcgcggtttcagacggcacgcaaaatatcgtgctggaagcggcttggtttgcgcccgaaatcatcgccggcaaatcgcgccaatacggtttcggttcggattcgtcgttccgcttcgagcgcggcgtggattaccgtttgcaggcggatgccattgaacgtgctaccgaattggtgttgcagatttgcggtggtgcggcaggcgagatggtggaagcgcaaggcgaattgcctgaagcgaagcaggttggattgcgtttggaccgtctgaaaaccgtgttgggcgtggacattcctgccgaacaggtggaaaccattttgcaacacttgggcctgcagcccgagaaaacggcggaaggcttccgcgttaccgcgccgagcttccgttttgacatcgaaattgaggctgatttgattgaagaaatcggacgcgtttacggctatgaaaacatccccgacgattacacgtcaggccgtctgaaaatgctggaactgcccgaaacacgccgcccgcgttttgccgtttacaacgaaatggcggctcgcggttaccgcgaagtggtcagctatgccttcgttgacgagcagtgggaacaagattttgccgccaacgccgaccccatccgcctgcaaaacccgctggcggcgcagtatgccgtgatgcgttccacgctcatcggcggcttggtggaaattctgcaaaacaatctgaaccgcaaacaaaaccgcgtgtgcgtgtttgaaatcgcccgcgtgttcagcaaaggttcagacggccagtttgtccaaaacgaacgcatcggcggattgtggtacggcgcggtcatgccggaacaatggggcgggaaaacgcgcaatgcggatttttacgacatcaaggcggacgtggaaaatctgttgaaaaacaaagcagtcgagttcgttaaaaccggacatcccgccctgcatcccggacgtgccgccaatatcgtttcagacggcaaagtcatcggctttgtcggcgaactgcatccgaaatggctgcaaaaatacgacctgccgcaagcgccgctggtatttgaaatcgatatggcggccgtgttggaatgcgggaaaacgcgctatcgggtcgtatcgaaattccagccggtgcgccgcgatttggcgtttgtgatgccggaagctatgagccatgatgatttgctgcttgtcttgaaaggcgcggcaaacaagttggtacaggaaatcagcgtgtttgacgtgtatcgcggcacgggactgcccgaagggatgaagagcgtggcggtcaaagtgattttgcaggatatggaaaacacgctgacggatgaggcagtcgagccgcttatcggaaaactgattggcgcggcaacggcggcaggggcgcggcttcgcagttaaaaaataaatattcgcttgaattttaaataaaaattggtaataatccacaactgttacaacagaaggtaatcatatgactctcactaaagcagaactggccgatattttggtagacaaagtcagcaacgtcaccaaaaacgatgccaaagaaatcgtcgaactcttttttgaagaaatccgcagcactttggcaagcggcgaagaaatcaaaatttccggtttcggaaatttccagttgcgcgacaagccgcaacgcccgggtcgtaatcctaaaaccggcgaggaagtgccgattaccgcccgccgcgtggtaactttccatgccagccagaaactcaaaagcatggtggaacactactatgacaaacaacgttgatttgaaggttcccgcaaaacgctatttcacgctggacgagttgtgcggactgttgcaaatcagcccctatggttttgcgcaatggcagcatgatcacggtgtggttgtcggttacggcggcgaacgctacacccgtttggatgtggtgaaactgttgaaattgcagagcacgtttgcaccgtatgcagaaggtgcggaatcgggttcggacggcaaccgtccggttacgcttcaggaaatcggagacgctctgaaagacctgttggcggatttggataaggaattgtgctgatttgaggccggttgcaggtatgcagccggttttgttttacacgctaaaaaataattatagtggattaacaaaaatcaggacaaggcgacgaagccgcagacagtacaaatagtacggaaccgattcacttggtgcttcagcaccttagagaatcgttctctttgagctaaggcgaggcaacgctgtactggtttttgttaatccactatattgcgtgatttcacattgtttcggcttgaagcacatggttttgtaatcatttacaggcagctcgcttggagtcctgttcgggcggtttgctgtttacttaaatataaggatgacggtcaatgagatttttcggtatcggttttttggtgctgctgtttttggagattatgtcgattgtgtgggttgccgattggctgggcggcggctggacgttgtttttgatggcggcaggttttgccgccggcgtgctgatgctcaggcatacggggctgtccggtcttttattggcgggcgcggcaatgagaagcggcgggagggtatccgtttatcagatgttgtggcctatccgttatacggtggcggctgtgtgtctgatgagtccgggattcgtatcctcggtgttggcggtattgctgctgctgccgtttaagggaggggcagtgttgcaggcaggaggtgcggaaaattttttcaacatgaaccaatcgggcagaaaagagggcttttcccgcgatgacgatattatcgagggagaatatacggttgaagagccttacggcggcaatcgttcccgaaacgccatcgaacacaaaaaagacgaataaatatgaatggaatgccgtctgaaggttcagacggcatttttccggtttgaaaatatagtagattaacaaaaaccagtacggcgttacctcgccttagctcaaagagaacgattctctaaggtgctgaagcaccaagtgaatcggttccgtactatttgtactgtctgcggcttcgttgccttgtcctgatttttgttaatccactataaaatagggctgtaaccttcaatcggaatttgttgcctgcgggatatacggtatgaatgtttggtatatatgggacaggatggtggaaatctatcataagtataagaagccgtgcctggttttggcggtggattttgtgatgggtatggtattcatagagccgaatgaggagccgtgcatcggtaggtgctatgcgcctatgtcggagtcccctgattttgctaacgctgttgcgatggctgttgctatgatctgtatcgtatggattgccgttttatagtggattaaatttaaaccagtacggcgttacctcgccttgccgtactatttgtactgtctgcggcttcgttgccttgtcctgatttttgttaatccactatatctatgactgattgaagcgttgggcggaggctgcgtgaaacggtattgggcgttgggccgtctgattccaatcgggcttggggaatgcgaaacggtgtgcgcttatactgcggacgatttgtttcgcggttttgcgcccgaaacggatggagaggtgtgggaaacggtctgtcggagtagaatacgcgttttgcgtttgaatacagtaagaagaaaagagagaaacttatgccgtctgaacatcaacacatatcatcattgcttgatttcgaccgtacccatctgcttcatccctatacttccatgaccgatccgctgcccgtttatcctgtcaaacgtgcagaaggggtgtttatcgaattggcggacggcacgcggctgattgacgggatgtcctcctggtggtgtgcgatacacggctacaatcatcctgttttgaatcaggcggttgagacgcagatgaaacaaatggcgcacgtgatgttcggtggtttgacgcacgagccagcggtggagctgggcaagttgttggtcgggattttgccgcaggggctgaaccgtattttttatgcggattcgggttcgatttcggtggaagttgcgctgaagatggcagtgcaataccagcaggcgcggggtttgacggcgaagcagaatatcgcgacggtgcgccgcgggtatcacggcgatacttggaacgcgatgtccgtctgcgatccggaaacggggatgcaccatattttcggcagcgcgttgccgcagcgttattttgtcgataatccgaaaagccgtttcgacgatgaatgggacggggcggatttgcagcctgtccgcgccttatttgaagtgcatcatgcggatattgccgcctttattttagagccggtcgtgcagggcgcgggcggcatgtatttttatcatccgcagtatcttcgcggattgcacgatttgtgcgacgaatttgatatcatgctgatttttgacgaaatcgccactggattcgggcgcacgggcaagatgtttgcctgcgaacacgcggaggtcgtgccggatattatgtgtattggcaagggtttgagcggcggctatatgacgctggcggcagcaatcacttcgcaaaaagttaccgaaacgatttcgcgcggcgaagcgggcgtgtttatgcacggcccgacgtttatggcaaacccgctggcgtgtgccgttgcctgcgcttcggtcaaactgcttttgtctcaagactggcaggcaaatatccgccgcattgaaagcatcttaaaaggccgtctgaaagccgcgtgggacattcgcggcgtgaaagacgtgcgcgttttaggtgccatcggggtgatcgagctggaaaaaggcgtggatatggcgcgttttcaagcggactgcgtggcgcagggcatttgggtgcgcccgttcggcaggctggtgtatctgatgccgccctatatcatttcagacggcgttttgaccaaacttgccgacaaaaccgtgcaaatcttgaaggaacacagcaaatgaaaggcgtttacttcgtcagcggcatagacacggacatcggcaaaaccgtcgccaccggcgtgttggcaaaacaattgttgcagcagggcaaaagcgtgattacgcaaaagcccgtgcaaaccggttgccaaaacattgccgacgacatcgccgtccaccgcaaaattatgggcataccgatgcaggaagccgacaaacggcggctgactatgcccgaaatcttcagctatcccgcttcgcctcacctcgccgcccgactggatggcagggctttggacttggacaaaatccgcaccgccacacaagaattggcggcgcagtacgaagtcgttttggtcgaaggcgcgggcggattgatggttccgctgacggaaaacctgttaaccattgattatatccgtcagcaaggctatcccgtcatcctcgttaccagcggacggctcggcagtatcaaccacactttactcagtttcgccgcgctcaaacaatacggcattcgcttgcacagcctcgtgttcaaccacatccacgacagccgcgacgcacacatcgcccaagacagcctgagctacttgaaatgccgtctgaaagccgatttttccgaagcggaatggatggagttggcaaaaacagacgcggtataaagattgggaaaaatatggaacacctatttgggaaatggctgcccgacttgcccgccgccatttcagacggcatcagcctgccgatggtgcggctgctgcacacccggtcgctgaccgccgcattgcgcgccttgccgcatacattttcggtggaactgctgaaactgggcgaattggagacggaatgcggagggaggctggtgcgcgaagttttgttgaagctggaccgtatccctgttgttgaggcaaggagcgaatgccgtatcggttcggcgttttggcaaaacattttggactgcggcacgcgtcctttgggcgagcgtctgtttcaagccgatttggaaggggcgcgttcggcgtttgagtttgccgttgccggcgaaggatgcggacggtactttgccgcgcggcgttctcggttttcccgtcacggcgaggaaatgctgctgaccgagtattttctgcccgaactgaaacgttttatcggataaaataccgttttttcaagctgcgcggcaatatgaatcctaaatcccctttatttttacgcctgtccgaccgtttggatgtgtacctgcgcctgatgcgggcggacaagcccattgggacgctgcttttactgtggccgacctactgggcattgtggctggcttcagacggcattcccgatttggcggtattggcggcgtttacaatcggcacgtttttaatgcgcagtgccggctgcgtcatcaacgactttgccgaccgcgattttgacggtgctgtcgagcgtacaaaaaaccgtccgttcgcacagggcagggtcaagaaaaaagaagcgctgctgctgacggcatttttgtgcctgcttgccgcattgtgcctgattccgctgaatcatctgacttggctgatgagcctgcccgcgctgtttcttgcgctgacttacccgtttaccaaacgtttttttccgattccccaactctatctcgggcttgccttttccttcggtatcccgatggcgtttgccgccgttgccggaaacgtgccgcctcaagcgtggatactctttgccgccaatgtgttatggactctggcgtatgacacggtttatgcaatggcggacaaagaagacgatttgaaaatcggcatcaaaacctccgccgtcacgttcgggcgttacgacatcgccgccgttatgctgtgtcacggaggctttaccctgctgatggcagtattgggtgcggttatcggtgcggcatgggcatattggacggcaatccccatcgtcctgctgctgcaataccgccaatatgccgccatcaaaagccgcgtccggcaaatctgttttgaaacgtttttggcaaacaacagaattggttgggtgtggtttaccgccatttttgcccatacgtttttcgcgaaataaggcagggcaatgccgtctgaagagccgtaaactgctttggacggcatttctatctgtgccgaaaagcgttaaaatatgtttttaaaacgctgtgttatgtcagcccgtaccgtatgcgggattgagatttgccccggcagtcggtacaatctttctgttttgcgatgtctgaaaagagaagcttatgagccttatcggcgaaattttgcctttgtcccatattgttttggatatggaggtaggcagtaaaaaaaggctgtttgaggaagcaggcctgcttttggaacgcgaatcctcattgtcccatgctgatgttttcgaatgtctttttgcccgtgaaaaactcggttcgaccggtttggggcagggcgttgccatcccgcacggccgtcatgccggcgtgaagcaggcgacgggcgcgttcatccgcacgcgcgaacccgtcggatttgacgcaccggacggcaagccggtttccctgatttttatcttgctggttccggaaaacgcaaccggcgagcatttggaagtcttatccaaactggccggcaagttttcccaaaaaagcatcagagaatcgctgatgacggtttcctctgcggaagaagtccgtgccatcctgactgaagaataatatgcccagtatctccgtccgccgcctgtttgatgacaaccaatacaaactgcaactcgcttgggccgccggcaattcgggtgcggacaaccgtatcggcgtagaggcggacaagcccgtcctcgccctagtcggacacctgaatttcattcatcccaaccaaatccaagtggtcggtttggcagagtcggaatatctgaaccgcctcgaatcgggggaaacgggttatcagtttggcgacctgttcgatatttctatgtctttggttattgtggcaaacggcttgccggtttccccgggactgcgcgactattgtcataaaaacgatattccactgctgacttccaaactcgaaagcccctatctgatggacgtgttgcggatttacctgcaacgcaccttggcggcatcgtccgtcaaacacggcgtatttctcgatgtgtttgaaatcggcgtgctgattaccgggcattccggcctgggtaagagcgaattggcattggaactgatttcgcgcggccacagcctgattgccgacgatgcggtcgagctgttccgcatcggcccggaaacgctggaagggcgttgttcgcctatgctgcgcgattttttggaagtgcgcggcttggggatactcaatatccgccatattttcggcgaaacttccatccgccccaaaaaaatcctgcaactcattatcaatttagtcgaggcggacgacgagtatatgaagcagcttgaccggttgagcatccgcaccgaaaccgaatccatcctcaacgtcaacgtccgttcggttacgctgcccgtcgccgtcggacgcaacctcgccgttttggttgaggcggcggtacgcaattacattttgcagttgcgcggtaaggacagtacgcgcgaatttttggaacgccatcagacgcaacttaaagaaaacgaacaacacaatgaagatcgtcctgattagcggcctgtccggttcgggcaagtccgtcgcactgcgccaaatggaagattcgggttatttctgcgtggacaatttgcctttggaaatgttgcccgcgctggtgtcgtatcatatcgaacgtgcggacgaaaccgaattggcggtcagcgtcgatgtgcgttccggcattgacatcggacaggcgcgggaacagattgcctctctgcgcagactggggcacagggttgaagttttgtttgtcgaggcggaagaaagcgtgttggtccgccggttttccgaaaccaggcgaggacatcctctgagcaatcaggatatgaccttgttggaaagcttaaagaaagaacgggaatggctgttcccgcttaaagaaatcgcctattgtatcgacacttccaagatgaatgcccaacagctccgccatgcagtccggcagtggctgaaggtcgaacgtaccgggctgctggtgattttggagtccttcgggttcaaatacggtgtgccgaacaacgcggattttatgttcgatatgcgcagcctgcccaacccgtattacgatcccgagttgaggccttacaccggtatggacaagcccgtttgggattatttggacggacagccgcttgtgcaggaaatggttgacgacatcgaaaggtttgttacgcattggttaccgcgtttggaggatgaaagcaggagctacgttaccgtcgccatcggttgcacgggaggacagcaccgttcggtctatattgtcgaaaaactcgcccgaaggttgaaagggcgttatgaattgctgatacggcacagacaggcgcaaaacctgtcagaccgctaattccgtcaaaccattatgccgtctgaaaccccgtcctccgtttcagacggcatttcaaatattgaaaagaaagaacagacatggcaatccaatggtttcccggccatatgaacaaggcgaaaaaagccatcgccgagcgtgcaaaaagcgttgatatggtgattgaaatgctggacgcgcgtatgcccgcctccagcgaaaaccccctgcttgcccagctttccaaaggtaaacccaaacttaaaatcctcaacaaacaagatcttgccgaccccgagcgcaccaaaatctggctcgaacactataacagccgccccgacacctgcgccatcgccctcgattcctccgaaacaggcgcacacggcaaaattacccaagcctgtcgtgccatgattccccaccgccaaggcatagataaacccctgcgcgtcctcatctgcggcatccccaacgttggcaagtccaccctcatcaacggcatgataggcaaaaaatccgccaaaaccggcaacgaacccggcatcaccaaagccgaacaacgcctcttcctcgccgatgacttctggctctacgacacccccggaatgctatggccgaaaatcatcgtcgaagaaggcggctacaaccttgccgccggcggcgcagtcggacgcaacgcgttggacgaagaagaagtcgccctcgaacttttagactacctccgccgccactacctccctatgttgcaagaacgctaccaagccgacaaagaccccagcagccactgggacgaaaacgtttggctcgaatggatagccaaaaaacgcggcgcagtcctcagcggcggacggatcaactaccaaaaagccgccgaaaacatcctcaccgacttccgtgaaggcaaaatcggcagaatcaccctcgaaacgccgaaccaatgggaaacttggctcaaaaaagcccgtcagaaagaagccgaactcaaagccatacgcgaagccagaaaagcagagcgtaaagggcagaagcttcggaagcataaagaatgccgtctgaaaaatatttttcaggcagcttctctctactccaaccgatttcagacggcatatccaaacccatgccgtttcagcacggatacccgtatgaccgacaaaatttctcccgacgcgctgattgaagccgcactgctgacccaaaccgaaccgctgaccgaaaaatctatgcgcgaactgtgtgtgccgccgttgtcgcaagacaaactgattgatgtgttggcgcagttgaaaacgcgttggcaggatagggcgttgcaactggtgcatacgcaagagggctggcgttttcagattgttcagacggcattcgagcggctgggcagcctgcaagaacagcgtgcgccgcgctactcccgcgccgtgatggaaacactggcgattatcgcctaccagcagcccgtaacgcgcggcgacatcgagggcatacgcggcgtggcggtgtcgcagaacgtgatgcagacttgcaggatcgggggtggattgaagtcatcggacatcgggacacattgggaaaacccgcattgtgggcgacaacggcaacgttcctcagcgatttgggtttgaacagcttggaagaactgccgccgctgaccgaactgggcgaactggttttgcccgatttgatagaaatgccgcctacggatgaagaagagccggaaaccgtaccgtccgataccctgcccaactgaaattccaaatgccgtctgaaacgcacattgcttcagacggcattgcaacaaataagcagataaaaacaagcactaagaaaaattaaggaaaaacttatttttaatttaaaaaatcttagttataattcgtatatctaaagttgatattgcttttgtcggtagaattgctaaggaatcctcacgatgcttctaacactttctttgcgtgattttgtcattgttgaaaatctgaatctggattttcaaagcggctttaccgtattgaccggagaaactggcgcgggcaagtccattactttggatgcgattggtctgctgttgggcgataaagccgattacagccaagtccgcagcggcgcaaaagaagcgcagttgtcggcgttgtttgatatttcccatttacctgttttaaaagcagaattgtatgaacaggggcttttaaacgacggagaagaagaactcagtatccgccgcattatcgatgccaaaggcaaaagccgcagctttatcaacaatcaggccgctaccttggcgcaactcaaagccgtcggtagccagcttatcgacatccacgggcaaaacgcccatcattcgcttaatcaggaagccgcccagcgcgaattgttggacgcatttgcgggtagcagggagcaggcggaaaccgtcaggcagctttatcaaaattgggccaatgcgaaaaaagccctccaagaggcgcaggaacacgccgatgccgtcattatcgagcgggagcgtctggaatggcagtttaacgaattgaatcagttggacattaaacaaggcgagtgggaagccctcagccaaagccacgacagccttgcccattctgccgagctgttgcaggctgccgaagaagtcggaagcaagattgacggcgacaacggcatccaacgccatatctatcaatgtcaaaaactattggccaatctgcaaaacatcgagccgcgctttgccgagagcctgaatatgttggcaagcatcgaagccgaattgggcgaaatcagtgccaatatgcgcgatgtggcaggtcgcagcgacatcaatcccaacgaacttgccgcacaagagcagcgcatgggcgagctgatggggatggcgcggaaataccggatcgagcctgaagagttgcctgccaagttggcagaaatcgaagaacgcctgcaaagcctgcaagctgccgccgatttggacgcgctcgagcataatgttgcccacaattttgccgaatatcaggaagctgcccacatcctttctgccatgcgccatcaggcggcagagcgtttgagcggcgaaacgaccgagcatatgcaacaccttgccatgaaaggcgcgcgtttcgacatcgtcctgttgccttcgtcgccgacggcacacggtttggagcaggttcaatttcaagttgccgccaacaaaggcaatccgccccgtctgctgaataaagttgcctccggcggcgaattggcgcgtatcagccttgccttacaggttgttgccagccaatatacccaagttcccaccctgatttttgatgaggtcgataccggtattggagggggagtggctgaaatggtcggcaaggcattacgtgcgttgggcagaaaacatcaggtgcttgccgttacccaccttccccaagtcgcatcctgcggagaaaaccactggcgggtgcgcaagcacagcgagggagagcaaaccgtcagcgaaatcagtatattggatgaaatccaacggatcgaagaggttgcccgtatgttgggcggagaagtcattaccgatacgacgcggcaacatgcggcagaattgctgcaacttgcgtcgaaaaatagtttattttaaaatcaatcagttaaaaaataactaaaaataaaagtctaaaacaatagacagaactcagataaatccgtattatcacgctttcttaatcacttgaacaagtgattgtgctgcacccgtagctcagttggatagagtatctggctacgaaccagagggtcgggcgttcgaatcgctccgggtgcgccagtaagaaaatacaatatgcgcccatcgtctagcggttaggacatcgccctttcacggcggtaaccggggttcgattccccgtgggcgtgccaattcaaaatgcctccgattatatcggaggcatttctcatttctcatttctcatttctcatactgagacctttgcaataacataggttactaaaattttatgctcaatctcattttcaaaatgcaaaacttttctgatttttcctactttttgctcaatattaggaaggttttaggcaattgaaaattttttggcgcatttttatgcgtcaaatttcgttaacagactatttttgcaaaggtctcggattaacaaaaatcaggacaaggcgatgaagccgcagacagtacaaatagtacggaaccgattcacttggtgcttcagcaccttagagaatcgttctctttgagctaaggcgaggcaacgccgtactggtttttgttaatccactatattgagtcctcgagaagggaaataaaaattaacatccttatatattgagttcctgagaagggaagattaacaaaaattaacgccctttacttcatacaatcaacagggctttttcattccttccttatctaacagggggtacagaaaccgaaacggctggcagggttaaggaagtcttcgaatgttacggaacattcatcttggacagcaaaggcaatttgttaggcattccttactccttattttgggaagaaaacgttatgggtgttttcgatattttaccgtcaggattggtatgtttatttgaatatgattttctgtggtcgggacggcatgcggcaaagacttaaggggttagatccttccttctgacgatggcgcggatgatggtgcggttggggtgtagggcgtggcgcaggcgttgtgaaaagggatggggcaagcctaggatttgggctgcaatggcggcggcgcagatgggggcggtggcgagtccgcgggtgccgtgcgcggtgttgacgtaggcattaggcaggtatgggcatggggtgtcgatgcggtagtttttgtccagcgcgagtttggtgtaggtctgccgcatggcggcaatgtcgccgagtgcgccgactaggggaaggtggtcggggctgtcgcagcgtatggcggcgtgcccttggtgtttttgggggtttgggttggcggcaaacaatgattcggaaagggcggggttaaggtgtgccaatgcttggcggtttgaggcttcttcggcttcgttccatccggtatggctgctgttgggaataaaactcgcgccgtagcagtgcagtccgtgccacgacgggctgatgtagctttcgcctgaaacggcgcaacgcagttgttcggaaaacggggtggacggtgtgaggccggtttgtccgcgtatttgcctgagaggcagggcggcgaggttggtttcgggtaggtaggggctgttcgcaccggtgcagtagatgatgtgtgtggcggtaaatgtgccgtttggcgtgcttgcaatccacttttccccgtcgtgggaaatgtcggtcaagggtgtgtcttcgtgtagtccaatgagcggatggttgaggagggtgcggacgaatgcgggtggattgagccatacgccgtgttgccagtagagtccgcatgaagggtggtcgtatgggacggacagtgggataccggcgattttttcggcttctgcagatgtgatgctgcggtagaggtggttatggtgtttttgcaaacccaattcgtgattgcgttgttgttcggtgcggctgtaattgaggtggatgatgccgttgccgccccaggtttcggattcgggcaggatgtgtccgagcaggcgtttggtgtagccgtagccggcaagcaaaagttcggtctgttcggtgtcgtgcggcgagattttggcgtagagcagcccttggcggttgccgctggcggcttgggcggcttttcgggcttccaatacggtaacggaaatgccgtgtgatgctaaggcgtgggcggttgccgcgccggatatgcccgcgccgataacgaggatgtgttccggtttttgccgttcggatgtttgtggaagtgcaaaccagggtttgtcgggcttgctttcggtttgcgggatggcttcggtctgccaggaaatgtggtggaaatgttcgtgcaggtggtgggtgcgtgaagggggaaccagccagaagcggacatcgggcaggatgtgttcgatgaggttgatgctgtcgaactggaggcactgcattgcctgatccaaacggtgcttcagacggcattccgcgtccgaagcatcttgtgcggtttgaaaatcgggaatctgattatcggggaggcagataatcaggttgagcgggggtgcgtgtttgcggatggcttggtcgagtgtgcggatgtcgggaatgccgtcccatacgagattgtccatatcaatgccgtttaaagtgtgggtttgaatatcggtatcgggataaagctgttaaaatacgcgccgtttgaaggcacgcctgcgcctgccggatattgtatgccgaaccgaggtgttttttgaataatattcctgttgaaatccgtttgttgaaaaaccgtaccgtgttggttttgacttatggggacgaacctaaaaatctgcctgccgaatttttacgcgtctattcgccgagtgcggaagtgcgcggacacggcgtgggacaggatgttttgcagaccggcaaggcggatgtccaaatcgcggatttgcagcctgtcggacagtacgcgctgaaaatcagtttttcagacgggcacgacagcggtctttacgattgggcgtatctgcacagactggcatacggatacgatgcgatgtggcaggaatatttggacaaattggcggcggcgggcgcgtcgcgttttgaagagaaataagaccggtcggatggtaatctgacgggcaaaggtatcagagaggtggttagaatatgggcggacagaaaacgcatttcggattcagtacggtcaacgaagatgaaaaagccggcaaagtggcggaagtgttccactccgtcgccaaaaactacgacattatgaacgatgtgatgtcggcagggctgcacagggtgtggaagcatttcaccatcaacacggcgcacctgaaaaaaggcgataaagtgttggacattgcgggcggtacgggcgatttgtcgcgcggttgggcgaaacgggtcggcaaggaaggcgaggtttggctgaccgatattaattcctctatgctgaccgtcgggcgcgaccgtctgttgaacgaaggcatgattttgcccgtatcgcttgccgatgcggaaaaactgcctttccccgacaattatttcaacttggtttccgtggcgttcggcttgcggaacatgacgcataaagatgccgcgctgaaagagatgtaccgtgttttgaaaccgggcggcacgttgctggtgttggagttttccaaaatctacaaacctttggaaggcgcgtatgatttctattcgttcaagctgctgccggtcatgggcaggctgattgcgaaagatgcggagagttaccagtatcttgccgaatccatccgtatgcaccccgatcaggaaactttgaaacagatgatgctggatgcgggcttcgacagcgtggattatcacaatatgagtgcgggcatcgtcgcgctgcataagggcgtgaaattttaaacggactggctgtgcagccaatgccgtctgaacacgtttcagacggcatttttgtgtttttttgagaaagagattttaaatcttaaaattaattcacatatccatcaataatttataaattttttaaaaaataggaacaattatcatttgcaagattgggagatgtctgtataatgcagtcaatccagtaaacaacgcagcagacgaaaggagggaaaaatgccggaaagtattttcaaacagatttcccttgatattttgaaactgcatcgggattctgtttattcgctgcttgccacttccggctgcaactgtcaggtgcatgaagcggcgtatgtcaacatcgacggcaaatattatattgcgctttcatgcgagcccgaggtgggggaagtcaaaacaggcattttgctgattgaggatgaaagccgcaaccttcgtttgagctgggtcggcagtgcgcgggagcttgactgcaaggataatgcctacaaacgcgccctgtccgcgttgtccagaaagctggggcggtgtaaggacaggctgcatacggcggttcaaccgtttctgttggagctggtaccggagaaaggcagattttctgtcggcgatgaagaagtttggatttctcgaaacgatttagtgagggctttatatcctgtcggatacagtatgcggcaggcagtgtttcagatttaaagttttggtagtggtttgtgttccttttgcgcccccttttccaaggggcgatttttttgcacgcgtgttggcggcaaaggaaaaatgccgtctgaaaggctttcagacggcatccgcgtgcggaattacctgtccggtaaaagacggataccttgattgcccagccgttttgacaattcggcaacctttccgtgttttcctaaaacaaaatcagggaggatttctgccaaagggcggatgacgaaactgcgttcgtgcgcgcgcggatgcggcagggtgagtcgggtgtcgtcgctggagatgccgtcaaagtcgataatgtccaaatccaatgtgcgcggcgcgttgcggaagctgcgttcgcgtccgaaatcagcctcgatacggttgagttcggcaagcagggcaatgccgtccagagtggtggaaacggtgcagacggcattgacaaaatcgggctgattgtcgtaaccgacgggcgcggtcatatacagtgaggaagcctgtttaagacggatgtcaggatgggacgacagcgtgtccaatgcggcgcgtacctgttgggcagggttttcaagattactgcccagggcgatgacggcaaaatgtctgttgttcataacggtgtttcagaaaggcaggactttggttttggcaaggtaaacgatgcaggcgacgcaacacatggcgagcaggtaaacggtgtagaacttggtcgaacgcggacgggcgcgcatcatcatcatacccaatgcgatataggcgagcagaagcaggatttttgtaccgagccaaggcgcgttgaacggggagaaatgggtaattttcatcagccacaatcccgtaaacagcagcatggtgtcgttaaggtggggcagtgccttccaaaagcccgccaagggcttttctggatttttccaaagtaggaaaaaacggatgttgaataccaaaatggtgatggtaacgaagatttggtggctgtatttgacaatcagatactgcatggtcggctcgtatcaaaataagggttagaatcggcttattttaccgcaaacagttatttttgacgcagtttttcaaataccaaaagatagggtgggctgtttttccggttggtaaagccgtaacgcaaaacggcaaactgttcttgaggcaggttttttgcccattgttcgattgcttctgcctcctgtttgccgttttcgtgtcccggatagaggacggcaataagcataccgttttctttcagtagggataaggtggcagaaagggcggcaatgctggtttccgtgcgggtggtaaggcttttgtccccgccgggcagccagccgaaattgaaaatggctgcatccagcggctttggaatatattgcttcaggttttcatgtccgtccaagatgagccgtacattgctgtaacctgcttcctgcagacggcatcgggtgttgttcagggcttgcggctggatgtcgaatgcccacactttcccccggatgcctgcggtttgtgcgaggaaaagggtgtcgtgtccgttgccggcggtgccgtccaaagcattgccaccttcgggaagtgccttccgcaaaaggcaatgggcgaatggaaggatgttttgcaataacatttttaaatgctgtctgaaaataaaaataccttaccgttgtccggtaaggtattgaaagatatgacacgtcatgcttcgtgcggattattcggcaggctgctggacggtttccacttggacgagggtcgaagtcggtgcggcttggggtctgttttcatgttgtaggttgacggagcgtgccggtacgatggtggaaatggcgtgtttgtaaaccatttgggtgacggaagtgtttctcaggagaacaacgtattgatcgaaagactcaacctgaccttgtaatttgataccgttaactaagtaaatcgaaaccggaacgtgctctttacgcagggcgttcaggaagggatcttgcaacatttgtcctttagctgtcatatttttaactccgttattatgattgtgaaatcgggcagacgccctgtgcgtgtcgaattgtagccttgaataggaaaaattaccaattttttttgtgtttgggcggttttccgccgggcatttgtatgtcaggagcgttgctgcagcatccacgattcgattttgcgggcgtcgttgacgcgtgtggcggatgtgggcgagttcagcaatacgatggtaacgggttggttttgaatgttggctttgacaaccatagacctgcctgcttcgcgtatgtagccggttttctgcaattcgatgttccacatgccttctctgaccagggcattggagtttttgtagttctgctgcccgtttttggtctgtaccgaggcgtagttggaagtcgagttggtgcggatttgcggatattgggcggcggcgttgaccataaggctcaggtctttggcggtagaaacgttttggaagttgagtccggtcggttcgtaaaagcggctgccgtacataccgaggctttgggctttgcggttcatggcggcgacaaatgcgcccatgccgccggggtaggttctgcccaatgcatgggtggcgcggttttcgctgctcatcaggctcaggtgcagcagttttttgcgtgtaagtgccgtacctatggcaagacggctgccggtccctttgatgcggtcgatttcgtcgggcgtaatggtaacggtttcgttcatgtccaagtttgcatccaaaacgaccatcgcgctcatcagtttggaaatggaggcgatgggcataatcctgtcggcgtttttctgatacagtatctgtccggttttgttgttgacgaccagggcagactgtgaggagagaatcagaccgcctgtaatggcttgggtgttggtggggtgtatcgtgctttcggcgaatatttctatcggatcggaggaggtaagcatgttctgttctaaaaattgccctaaaatgtcgttgtcggcaaaaaggtgggctgacggcagggaaaggcagagaccgagcagcagcgatgagggcaggcgtttcagagtatggatggacatttttgattccatatttttgagtattggcgttattttgttgaaaaaacagccatctgtaaagtatgtcgtctgacaggagactgcccgtaggcgggcggtcttgttgtgttttggggattgggttttataacattctgtttttaaatcggaacatattttgtggtttgacatggatatttttcatgccgtcgtgtgtcggtttggatgtttccggcggttgaatccttgtcctttggggcggtagaatcggggttggtttggcaattgcggcggtgcgtctgcgtgccgttttgaataatgggaatatcgggagtaggactatggatgtgaaatatgaatttaccctgccttcgagcagcggtgcggattttcattcggcagaacatctgcctttggtcgtgtatttttatccgaaagacagtacgctgggctgtacgacggaaggcttggatttcaatgcgcgtttggaacagtttgaggcattgggttataccgtggtcggtatttcccgcgacggcgtaaaggcgcatcagaatttttgcgccaagcagggtttccggttcgagctgttgagcgacaaggatgaaacagtgtgccgcctgtttgatgtcatcaaattgaagaaactgtacgggaaagagtcgttaggtatcgagcgcagtacgttcgtcttgaataaggatggagaaatcgcccatgaatggcggaaagtcaaagtggcgggtcacgcgcaggaagtattggaaacgctttcccgataatgtgaaccatgccgtctgaagaagattcagacggcatttgtttggaacggtatggaagaaggtttgatcgacaggctgcttgaaacgctgtggttggacaggcggctcagtcagaatactttaaacggttaccggcgcgatttggaaaaaatcgcccgccgcctgtcccaatcgggcagaatgctgaaggatgcggacgaagcggatttggcggcggcggtttatgttgacggagagcaacggagttcgcaggcgcgcgcattatcggcatgcaaacgcctgtatatatggatggagcgtgaaggcataaggacggacaatcccacccgtttgctgaaaccgcccaaaatcgacaagaatattccgaccctgatcaccgagcagcagatttcccgactgcttgccgccccggataccgacacgccgcacggtttgcgggacaaggctttgctcgaattgatgtacgcgaccggcttgcgcgtcagcgaggcggtcgggctgaacttcggcaatgtggatttggacaggggctgtattaccgcgctgggaaagggtgataagcagaggatggtcccgatggggcaggagtcggcgtattgggtggaacgctattatacggaggcacgcccacttctgctgaaaggcaggaattgcgacgcattgtttgtcagtcagaaaaagacgggcatttcccgtcagttggcatggatgattgtcaaagaatatgcaagtcaggcaggcatcgggcacatcagcccgcacagcctgcgccacgcctttgccacgcatctggtgcggcacggcttggatttgcgcgtggttcaggatatgttgggacatgccgatttgaatacgacgcagatttatacccatgttgccaacgtatggttgcagggtgtagtgaaggaacaccattcccgaaactgaggcttctactttggtttaataagaaatcaatcgaaaatgcaaacttgataaaaaattaccaagacaaaccgtgtataccgaccttgcaatgcgaaccgtttttatttatattcgcatacgataataaaagccgctatcggtacgatagtttgagaacacacggagcacaaaatgtttgtctgcatctgcaatgccgttaccgaccatcaaatcaaggaaaccatcgccgccggcgcgaccacaatgggcgatttgcagtcgcaattgggcgtagcgagctgctgcggctgctgcggggagcttgccgcttcgtttctgacggcgcacaatgcgcaaccgacggttacggcgggtatcaacgttcaagcgtaaaacggttttcgaaatgccgtctgaactgttcagacggcatttttactgtttttggcaggacttgagtatcatcttcctcgaaaacattgttttttcccaaatagaccatgattctgctgcgtctaaggctttggcgtgtgcaaattgacagataaggaaacgcggatgaaattgaccttgatgtttcgtgaatattgcagcttgtgccacaaaatgcgcgacgaactcaaaccttttcaggatgaatacgggttcgggctggaagtggtcgatgtggatgaaaatcctgttttggaagaaaaatacaatgagctggttcccgttttgttggcgggagatgaggaaatctgtcactggtttttggatgaggacaggttgaaacagtttctcgaacggtaaaaaaatgccgtctgaagcaggacttcaggcggcatttttttcaaatcaacgttctttacgtttttgcggggcggatgacctgccggtaaaggaagcacgtttggatgcttggtaaattgctagtcttcttcgatgttgcatattaaccctttctttattttatttgtcggttgggaggattcttatttattgattttttcaataaaaattagaaaatttattgtgagatgttattgttggcaatcatatcatgttttactgttgatggaagcatgattgtgtaaagatgatatgtgtttgtgtaatcggtagattttatagtggattaacaaaaatcaggacaaggcgacgaagccgcagacagtacaaatagtacggcaaggcgaggcaacgccgtactggtttttgttaatccactatataagaaaaccgccaaggcggtgcttgacggcggaaacagaggggcgggcggcatcagagcagcttggaaacgacctgtgcaaggctttttgccagtctgacggtttgatgccgaagtcgttttcgattttgcggcagtccaaaatgctgtatgcgggcctgggggcggcggtcggatattccttgtctgaaacggcagtcaattcgggaacggggaaggatgtctgctgttgcgatgccgcttggaaaatatgttgggcaaattcgtaccaggatacggatttgctgccggcgtagtggtaaatgccgcgaacgggattggagtgctgcaacaggcggatgatggtggcggacaagtcgccggcataggtcgggcagccgatttggttgtggacggcggacagcggggaacgttcccgcgcaaggttcagcatcgtgcggataaagttgtccccgtattcgctaaacagccaagaagtccgcaggataaggctgtcgggattggcagacagtgcgagcagctcgcctgcggttttggattgtccgtatacattggaaggattggtaaagtcgctttcctgatagggtcttttccctttaccgtcaaagacatagtcggttgagatgtggatgaatcgggcatgggcgcgatgtgctgccaaggcaaggttgtaaacggcggaagcattgacggcaaatgccgctgccgcatcgccttccgccttgtcgacggcagtataggcagccgtgttgacaatggcgtcgggttggaaacttttgaccatgttgcagacggcatcggcatcggtaatgtctagggatgcggaatccgtcgcaatggtttcccagtcttccggaagacggtcgcgcaggcagcgtgccagttggcttttcgagcctgtcaataggattctcatgaggtatttcctttggtaaaagtgtattgtaggacttgctgtcggtattatagtgccaaaattttgccgacggttgacgggttggctttttgtgccatgggtattgttttgcgccgacttcggctagaatatcggtttgtgattcaaacctgtcgggtgtcgggtcggtattttcaagatattttcaggggggggcgaaatgagtgagattggtttggtaaagatctattttggaaaagtgcgcgatttatatgaaatcgacgataaacgtatgctgatggtcgcttccgaccgcctgtccgcgtttgatgtgattttggacgacccgattccgagcaaaggggagattctgacgcagatttccaatttttggtttaaaaaactggcgcatattatgcccaaccactttaccggtcaaacggtttacgatgttttgcctgaaaacgaagccaaagctttagagaaacgcgccgtcgtggctaaaaagctcactccggtgaaagtagaggcgattgtgcgtggttatctggcaggcagcggttggaaagattatcaaaaaaccggctcggtttgcggtattcaactgcctgaaggtatgcaggaagcgcaacaactgcctgaagtgatttttacgccctcaaccaaagccgcagtcggcgatcacgatgaaaacatcagctttgaagaatgcggacgcattatcggcaaagaattggcggaagaagtgcgcgccaaggcggttcggctttacaccgaagcggcggaatatgccaaatcgcgcggtattattatttgcgataccaaatttgaattcggtttggatgaaaacggtacgctgacgctgatggatgaggtattgactcccgattcgagccgtttttggcctgccgaccaatacaaagtcggcaccaatccgccgtcttttgacaaacaattcgtccgcgactggctggaacaaagcggttggaacaaaaaagcccctgcgccgaaagtgcctgccgatgtgattcagaaaactgtcgagaagtatcgggaagcattgactttgctgactcaggattgatttttaagtttgaaggccgtctgaaagaaatatggttcagacggcctttttattgtatcaatactggattttaaggatggttgcctttataatccgcaattgctttcagcgtccgaaatgccgtctgaaagcttgtttataacctgccgcacggtctgaaaccctaactatgcacattcggattttagtgtgcattattagtgttttagcagtgcggtattttgaaaggaacaatgatgttcgacaaacacgttaagaccttccaatacggtaatcagaccgttactttggaaaccggcgaaattgcccgccaagccgccgctgccgttaaagtctctatgggcgacaccgttgttttggttgccgttaccaccaacaaagaagtgaaagaaggtcaagacttcttccccctgaccgtcgattatttggaacgcacttacgccgcaggcaaaattcccggcggtttcttcaaacgcgaaggcaaacaaagcgaaaaagaaatcctgaccagccgtctgatcgaccgtccgattcgtccgctgttccctgaaggtttctaccacgacatccaaatcgtagcgatggtcgtgtccgtcgatcctgaaatcgattctgatattcctgcaatgttgggtgcatctgccgcgctggtgttgagcggcgtaccgtttgccggcccgatcggcgcggcacgcgtcggttatgtaaacggcgtgtacgttttgaatccgactaaagccgaattggcgaaatcgcaattggacttggtggtcgccggtacttcaaaagccgtgttgatggtggaatccgaagccaaaatcctgcccgaagacgtgatgctgggcgcggtggtttacggccacgatcaaatgcaggttgccatcaatgcaatcaatgaatttgccgacgaagtcaatccggaactttgggattggaaagcacctgaaaccaatgaggaactggttgccaaagtccgcgggattgccggcgaaaccattaaagaagcgttcaaaatccgtcaaaaacaagcgcgttctgccaaattggacgaagcttggagtgcggtaaaagaagccttgattaccgaagaaaccgacactttggcagccaacgaaatcaaaggcattttcaaacacttggaagccgatgtcgtccgcagccaaattttggatggccaaccgcgcatcgacggccgcgacacccgcaccgtccgtccgctgaacatccaaaccagcgtattgccgcgcacgcacggttctgcattgtttacccgtggcgaaacccaagctttggccgttgcaactttgggtacttcgcgcgacgagcaaatcatcgacgcgctgtccggcgaatacaccgaccgctttatgctgcactacaactttccgccgtactctaccggcgaagtgggccgcatgggcgcaccgaaacgccgtgaaatcggtcacggccgtttggctaaacgtgcattgttggccgtattgccgaaacctgaagatttcagctacaccatgcgcgtggtctccgaaattaccgaatccaacggctcttcctctatggcttccgtctgcggcggctgcctgagcctgctgtctgccggcgtgcctttgaaagcacacgttgccggtatcgcgatgggtctgattctggaaggcaacaaatttgccgtcctgaccgacattttgggcgacgaagaccacttgggcgatatggactttaaagtggccggtacgaccgaaggcgttaccgcgctgcaaatggacatcaaaatccaaggcattaccaaagaaattatgcaaatcgctttggcacaggccaaagaagcgcgtctgcacatcttggatcagatgaaagccgccgttgcgggcccgcaagagctgtccgcacacgcgccacgcttgttcacgatgaaaatcaaccaagacaaaatccgcgaagttatcggtaagggcggtgaaaccatccgttcgattaccgctgaaaccggtacggaaatcaatattgccgaagacggtacgattaccattgccgcaaccactcaagaagccggcgatgcggcgaaaaaacgcatcgagcagattactgccgaagtggaagtgggcaaagtgtacgaaggcactgtggtgaaaatcctcgataacaatgtcggcgcgattgtcagcgtgatgccgggcaaagacggtttggtacacatcagccaaatcgcccacgagcgcgtacgcaatgtcggcgactacctgcaagtcggtcaggtggtgaacgtgaaagcattggaagtggacgacagaggccgtgtccgtctgtccatcaaagccctgctggacgcgcctgcccgtgaggaaaatgccgccgagtaacgcttagggtgaaagtgccgtctgaacaggtttcagacggtattttttacgggtatcgggaatgaatggggcttacagccacaggacggcaagtttccataatgcccataatgatacggataatcccgtacacaggcggatatatcggttttgcatgatttttttcagttgcagggaaaaaatgccgattgctaaaagattgggcagcgtacccagtgcaaaggcaagcatatataacccgcccgttgccgcactaccgcttcccagcgcgtaaagcgacgcgctgtaaaccagtccgcacggcagccagccccataatattccgaccgcaaggcaggcgggtatggattttatgggtaacagccggttgagtatcgggttcaggttccgccatatcggtttgccgattttctcgatttttgccgccaaggaagaaataccgctcaagtataagcctaaaaagagcagcaggaggttggcggccgtgtataaaatattctgcaggacgcgggtttggtcgagtgaaacgccgacctgtccgattaatccgagtatcaggccgattgccgtatagctgcttacccgtcctgtgttaagcagcaggatcagccaaaagcggttgatatgcggggggagttggagcgcaaacgcgctgcttaatccgccgcacataccgatgcagtgcgttccgccgaagaaaccgagtaggaacagggtgaggaaagtgatgtcgtggttcataggcagtttgaagtcaaatatttttcgggaaaagggatgatttgcggcagtccggcacataggatccgccgagggcattgcccgtgctgttaaagtcttgaataaggatgcagtttgcaccctgtatttcgataattttgtaaaatccgccctttactgcgccgtcggcgggtttgccgtgtgcgtcaaaatacaggatggtgcggttttgaagatgcgcgcaatttgaaacggccgggtttgccggtatgtttcgggtgcaggcggcaaggattgcacaagggaaaagcaacagtaatatgcggaacatggtgtttcttgtaaggggtaacaaacagtataatggctgattttaatcctcaggcggcgggagatggaagcatttcccttcggtgcgggggatttcggattcggaagcaacagacgatacgggatttcggaacaatatgaacactttgaaatttaccaaaatgcacggtttgggcaacgattttatggtgattgacgcggtcagtcaggattttacccccgaggacgcgccgattgcggaatgggcggaccgcttccggggcgtgggcttcgaccagcttttggtggtcgggcgttcggaaaccgaaggcgtggatttccgttaccgtattttcaatgccgacggcagcgaggtcgggcaatgcggcaacggagcgcgttgttttgcccgttttgttgcagacaagggtttgaccgataagaaagaaatttgtgttgaaacggcaaatggcgttatttttccgaaattgtccgataacggtatggttacggtcaatatgggcaaaccgaagtttatgccgtctgaaataccgtttgtccccgaatcgggcgagggggatgatgcctgtatttacggggtgcatctcgaatccggcattcagcctgtcagctgcgtcaatatgggcaacccccatgcggtgattgtggtcgatgacgtggaatgcgcgccggtgcgcgaaaccggttcgcttatcgaaccgcacaggcagtttcccgaacgcgtcaatgtcggctttatgcaggttgtcggccgaaccgcgattcgtttgcgcgtgttcgagcgcggcgtgggcgaaacccaagcttgcggtacgggcgcgtgtgcggctgtggtggcgggtatccgtctggggctgttggatgaagggaaaacggtagaggtggttttgccgggcgggactttatatatcgaatgggcctgcggcggcgatgtgatgatgaccggccctgcggaagcggtgtttgaaggtgagttggcgtattcatgattttgctgcatttggattttttgtctgccttactgtatgcggcggtttttctgtttctgatattccgcgcaggaatgttgcaatggttttgggcgagtattatgctgtggctgggcatatcggttttgggggcaaagctgatgcccggcatatggggaatgacccgcgccgcgcccttgttcatcccccatttttacctgactttgggcagcatattttttttcatcgggcattggaaccggaaaacagatggaaacggatggcaggcagaccccgaacatccgctgctcgggctttttgccgtcagtaatgtatcgatgacgcttgcttttgtcggaatatgtgcgttggtgcattattgcttttcgggaacggttcaagtgtttgtgtttgcggcactgctcaaactttatgcgctgaagccggtttattggttcgtgttgcagtttgtgctgatggcggttgcctatgtccaccgctgcggtatagaccggcagccgccgtcaacgttcggcggctcgcagctgcgactcggcgggttgacggcagcgttgatgcaggtctcggtactggtgctgctgctttcagaaattggaagataatacggtgcggccgtatcggaacaaaaagttataaagaaagaaattttggatattggttttttaggcggcataggtttaggataaagccatatccgaaatttgtttatgtttcggcgcaaatcccctgcaatcggacaggatgcctatggggattgcgccttactgtcgaaaccttattattcaggagcagaagatgaaaattgcaaacagcattaccgaactaatcggcaacacgcctttggtcaaactgaaccgtctgaccgaaggtttgaaggcagaggttgccgtgaaactggaatttttcaatccgggcagcagcgtcaaagaccgcattgccgaagcaatgattgagggtgccgaaaaagcgggcaaaatcaacaaaaacaccgtcattgtcgaagcaaccagcggcaatacgggtgtcggtttggcaatggtatgtgccgcacgcggctacaagctggcgattaccatgccggaaagcatgagtaaggagcgcaaaatgctgttgcgcgcgtttggtgcggagctgattctgacccctgccgccgaaggtatggcgggcgcgattgccaaagcgaaatccttggtggacgcgcatcccgacacttattttatgccgcgccagttcgacaatgaggcaaaccccgaagtccaccgcaaaacaaccgccgaggaaatttggcgggatacggacggcaaagtcgatgtcttcgttgccggcgtcggcacgggcggtacgattaccggcgtgggcgaagtgttgaaaaaatacaaacccgaagttaaagtggttgccgtcgagcctgaagcttcacccgtattgagcggcggcgaaaaaggcccgcacccgattcaaggcatcggcgcaggctttattccgaccgttttgaataccaaaatttacgacagcattaccaaagtgtcgaacgaagcggcttttgaaaccgcccgcgcaatagcggaaaaagaaggcattttggtgggtatttcttccggtgcggcggtttggagtgcgttgcagcttgccaaacagcctgaaaacgaaggcaagctgatagtcgtgctgctgccttcttatggcgaacgctatctctctacgccactttttgcagatttggcataatgctttaatcggattgtcgaaacattcagacgcatttttcggtatcggtgtaacgccgtgccggaaaatgcgtttttgcatatatgccgaaaacgccggttgtgttttaatcaggtgttggtgtcgccgcatcgcttgagggaaatattttttatagtggattaacaaaaatcaggacaaggcgacgaagccgcagacagtacaaatagtacggaaccgattcacttggtgcttcagcaccttagagaatcgttctctttgagctaaggcgaggcaacgccgtactggtttttgttaatccactatattcgggttttatttggcaggacggttttttgccccaacggaaaatagcctgcctgcccgtaaaatcagccgtttgtccgggtgcagccggggctttgggcttcagacggcatattttcggaatggcggcattcttgccgtcggcgcggcagccgtatggggaagggaggggatattgtggtcggtaacggcaaaaaatatgccgcaccattgctggtgctgggttgcgtggtgttcggtctgggcagtctgattgtcagatccgtccccgtcggttcgtatgcaatcgcattttggcggttgctgatttcggtgttcgtattttggtttttagcacggtttttcaggcaaaaattcccaaaaaacaggaaaaccgtccgatatgccctgacggcgggcgtgtttctcgctttcgatttggcgttgtggcacgaaagcatacacgcggtcgggccgggtatttccaccctgctcaacagcctgcaaatctttttcttgtcggcaatcggtgttttctttttcggcgagcgtttgagcgggctgaaaaaggcaggcttaatatcggcagttgccggcgtggcgatgattgccggtgcggaattcggctacaacggtaatgcggtttggggattcgccagcggtttggtatcgggactgatgctcgccctgtcgatggtgtttgtccgcaaaacccatgaaatcgagccggtggcgcttttcccttcaatgatgattttgagtttgggcggcgcggtatcgctggttgttccggcattgctgatggatggcggcgcgctttatccgacgacttggaaagatgcgggtttggtgcttgtgtacggcgtggtgatgcagtgcttcgcgtgggcgatggttgcctatgcgattccgctgctttcgctgtcgctgacggggctgctgcttttgtccgaaccggttgccgccctgttcatcgattatttcgggttgggcaaaccgattgaaggcgtgcagtgggcaggggtggcgctgacgctttcggcaatttacctcggttcgctgaaacggcagtcttcacattgatttcatcagggcaatattggcagttcgccgtgcaaaacctgcgtatattggactgataggtaggaaaatccgacaacgttagactcgcctgtaaaagtgaggaatagcaaatgccgtctgaaactattttcagacggcattcttggcttcctggcctaacggattgccgtaccggacctgccgaaatcgccgaagttcatcaaaatgaacattgccttgccgacaaccagcttgtcatccacaaatccccagtagcgcgaatcggcactgttgtcgcggttgtcgcccatagcgaaatagcgtccttcgggaactttgcacacgaaaccgctgccgtcgtcggcatattggcagtgttccaaaccgctttgctctatggaatatccgttttcagacataatatcggaggtatatttgcccaatacgggcagggaaacggcaggctgtccttcttttttcagaatattgaaggatttgccgtctagaccgctgcggaacatatccgtgttgtggatttcggaagggtcggtgtcgtcgggataacggtatgtgccgtcaggaatgtcggaagtgggtttgccatttaccgtcaaaatcttatcccgatattcgaccacatcgcccggaatgccgacaatacgcttgatgtaggtcatctccggctgcagaggataattaaaaacaacgacatcgccccgttcgattttgcctgtaggaataaatatattgtttaaaacgggtacgcgcaggccgtaggaaaatttgccgaccaaaatgaaatcgcccttgatcaggcccgggcgcatcgagctggacgggatttggaacggttcggcgataaacgaccggatgaggaacaataccaaaacggtagggaagaaactgccgaaataatcgccgaagtggctgctttccgagatttcgggatgagtcttcaggcggtatttatataccccccaagccgtaccgcacaatacaacgaaaatcaggaaaacggcggtaaagctcataaacagggacaaagcggcaaacacgccgaccgctgtcaggatataggcgtattcaaggccggaactccattccccgttttcctgccgcttcttgtcgcttttgaaataaaggatgatgccggcaagcagcgcggcagccgcgcccgacattagcattgtgttcattgttgttccttaatgcttaaaaacccgcctgtccgtgcaaccgttttaaggcggcaaattgcaaaatttgtttgcgggcgcgtgcccctgaaatcagggcggtttgaggggtgttcccgacgcgccgccctgtgtgccggagttatttgtcgctcacctgcaaaatcgccaagaacgcgctttgcggaatttccacattgcccacttgtttcatacggcgtttacctgccttttgtttttcaagcagttttttcttacgcgtaatatcgccgccgtaacatttcgccaagacgtttttacgcagtgctttgacgttttcgcgggcgataatctggctgccgatggcggcttggacggcaatgtcgaacatttggcgcggaatcagctcgcgcattttcgatgctagctcgcggcctcggtgaaccgcgctttgacggtgcacaatcaggcttaaggcatcgactttttcgccgttgaccataatatccagcttaatcaaatcagacggttggaactctttgaaatgataatccaacgaagcatagccgcgcgaagtggatttgagtttgtcgaaaaagtccatcaccacttcgttcatgggcaaatcgtaagtcagcatcacttggcggcccatgtactgcatattgacctgcacgccgcgcttttggttacacaaagtcatgacgttgccgacgtattcctgcggcacaaggatggtcgcggtaataatcggctcgagtatggtttcgatgctgccgatgtcgggcagtttggacggattttcgacttcgattttttcgccgcttttcaacacgacttcataaatcaccgtcggcgcggtggtaatcaaatccatatcgaactcgcgctccaagcgttcctgcacgatttccaagtgcaacagacccaagaagccgcaacggaagccgaaacccaatgcttgggaaacctcaggctcaaatttcaacgaagcatcgttaagctgcaatttttccaaagcatcgcgcaaagcttcgtagtcgtggctttctacgggataaagtccggcgaatacctggctttgcacctcttggaaaccgggcagcggctcagtggcagggttggcaaccaaagtaaccgtatcgccgactttcgcctgtcccaattcttttacgccggtaatcaaaaagcccacttcgccggcttttagttcttgtttttgaactgatttcggtgtgaatacgcccagctgctcgacctgcgtttccgccttggtgctcataaagcgcactttgtctttcagtttgatggtgccgtttttcactcgaatcagcataaccacgccgacatagttgtcaaaccacgaatcgacgataaccgcttgcagcggcgcgttttcgtcgccggtcggtgcggggattttggcaacgatttcttccaaaacgtcttccacgccgatgccgcttttggcggaacattgcaccgcgccgacggcatcgatgccgatgatgtcttcgatttcctgttccacgcgttcggggtcggcggcgggcaggtcgattttgttcaaaaccggcacgacttccacgcccaaatcaatcgcggtgtagcagttcgccacggtttgcgcttccacgccttgcgacgcgtcaacgaccaaaagcgcgccttcgcaagccgacagcgaacgggaaacttcgtaagagaagtcgacgtgtcccggcgtgtcaatcaggttgagttgatacacctgcccgtcgcgtgctttatagttgagcgcggcggtttgcgctttgatggtaatgccgcgctctttttcgatgtccatggaatcgagcacctgcgtactcatttcgcgcaaatccaaaccgccgcagtattggatgaagcggtcggcaagcgtcgatttgccgtggtcgatgtgggcaatgatggagaaatttcggatatttttcattagagttgttttgaatgtcggacagtgggtttgggaaatgccgtctgaacaaacggcgttgcgtccgaatatcgggtgcaacgtggaaatagcccgttattctaacggaaaaccgctgttttggcataagtttgataaaggtcttataaagatttgacgatttctgccaccatttttgcggaatttgccgccgccgttttcaagaactcgtcaaagctgatgtctgctttttcatctgccgaatcggaaaccgcgcggatgatgacgaaaggcgtttccaactgatgacaggtttgggcgattgccgccgcttccatttccactgctttgacttcggggaagtgcttgcggatttccgccacgccttcgctgctgtggacaaagcggtcgccgctgacaatcagcccttgttctaccgccgcgccttcaaacgtccgcgccgcccgttttgccgcctcaatcaaaatgccgtctgaagcaaaccttgccggcagttgcggcacttgtccccaggcatagccgaatgcggttacgtcgacatcgtggtgtgcggtttccgtgccgatgactacgtcgccgactttcaaacccttgcccaaaccgcccgcgctgccggtgttgatgacgcagtccgctgcgaattcacggataatccaagccgttgcaaccgccgcgttgaccttgccgatgccgctcaatgcaagcaccatgcgttttcccgccaattcgccttcataggcggaaaatctgccgaaagagacggctttgacattttccatcatctcgcgcaaaagctcgatttcttgttccattgcgccgataacggctactgttttcaaagacatattgctgacctgttgtgaatttcggatagaatgcctgattatacacgctaacacggcaggattgagtggaggtggtttgtccgtgccgtctgaaacggtttcagacggcacggcgggtttttggtagaatgggaaggtacagattgtttgaagattaggggacgaggatgtttaccgatgaaaatatgaccgcaaaggaagaactgttcgcatggctgcgccatatgaaccaaaacaaaggttccgacctgttcgtgacaacccatttcccgcccgcaatgaagctggacggcaaaatcacccgcatcacggacgaaccgctgacggcggaaaaatgtatggaaatcgccttttcgattatgagtgcgaagcaggcggaagaattttcatcgaccaacgagtgcaacttcgccatcagcctgccggacaccagccgcttccgcgtcaatgcgatgatacagcgcggcgcgacggcgttggtattccgtacgattaccagcaagattcccaagtttgaaagcctgaacctgccgccagtcttgaaggatgtcgcgctgaaaaaacgcgggctggttatttttgtcggcggcaccggctcgggtaaatcgacttcgcttgcctcgcttatcgactaccgcaatgaaaattcgttcggacacatcatcaccatcgaagacccgatcgagtttgtccacgaacacaaaaactgcatcatcacccagcgcgaggtcggcgtggatacggaaaactggatggcggcgttgaaaaacacgctgcgtcaggcgcctgatgtcatccttatcggcgaaatccgtgaccgcgaaacaatggactacgccattgcctttgccgaaacggggcatttgtgtatggcgacgctgcacgccaacagcaccaatcaggcactcgaccgcatcatcaactttttccccgaggagcggcgcgaacaattgctgacggatttgtcgctcaaccttcaggcgtttatttcgcaacgcctcgttccgcgagacggcggcaagggcagggtggcggcagtcgaggtgctgctcaattcgcccctgatttcggagttgattcacaacggcaacatccatgaaatcaaagaagtgatgaaaaaatccactaccctgggtatgcagaccttcgatcaacacctttaccaattgtatgaaaaaggcgatatttccctgcaagaagcattgaaaaatgccgattccgcacacgatttgcgtttggcggtacagttgcgcagccgccgcgcgcaaagttccagccccgatttggaactgctctgatggcggtatggatttccggacggatggtttgaaatgatttatccgtggcataatgagcaatggcggcagattgcggaacattgggagcgtcgtcccaatgcatggctgtttgccggcaaaaaagatacggggaaaactacatttgcccgctttgcggcgaaggcactgttgtgcgaaacccctgcaccgggctgcaaaccctgtggcgaatgtatgtcctgccatctgtttggacagggaagccatcccgatttttacgaaatcacccccttgtcggacgaacccgaaaacggacgcaaactgttgcagatcaaaatcgatgccgtcagggaaatcatcgataatgtgtacctgacttcggtacggggcggtttgcgcgtgattctgattcatcctgcggaaagtatgaatgtccaagccgccaacagtttgttgaaagtgttggaagaaccgccgccacaagtggtctttttgctggtcagccacgcggcggacaaggttttaccgaccattaaaagtcgctgccggaagatggttttgcccgctccttcccatgaagaggcattggcatatctgcgtgaaaggggtgtggcggaacctgaggaacgtctggctttccattccggagcgccgctgtttgatgaggcggacggtgtccgtgcgttgcggattaaactgttggatattttggcagaaccaaggttgttgaagattttggattacgccgcgcttttcgataaggaaaaacttccgctcgccgtatttgtcgggtggatgcagaaatggctggtcgatttgggattgtgcctgcaacacatgaaacccgtctattatcccgcttatgaagacaggctgcttcagacggtatccggtttccgtccgcgcaatgtatttgcggcggaggatatgctcaaacagcttgccccctacgggtttcatactttaaatgtcaaaatgcagatcgagcatctgctcatcaactatttggaattgaagaaagagaacgggtgaattatgtcagacggacaaaatattccggcaaaaatgatgtcgttgcagctgaaagacatgaatctgctgtacagctcctacatgccgtttttggaacacggcggtctgtttgtgcagaccaacgacgtattttccatcggggacgatattctgcttgccgtagaaatcctcaacttccccaaactgttcctgccgaccaaagtcgcctggatcaatcctgcgcgtacttcctccaaacccaaaggggtggggctggcattcacaaaacacgaaaactgcctgaaagtcaaagaccagatcgaagtcgaactgggcaacacaatcggcggcagcagacctacgtttaccatgtaacgccatgcatatcatcgattcgcactgccacctcaattttgaaggtttgaaagaacgcctgcccgaagttttgtccaacatggaagcaaacggcgtggggcaggcactcgccatcagcgtcagtagggaaagcttctccgaagtctttgccatcgccgaagcgcacgaacacatctattgcaccataggcgtacatcccgacagcaaggaagccgaagaattttccattgcggaaatggtcgaagccgccgcccatccgaaagtggtcggcatcggcgagacgggtttggattattactggtgcaaaggcgatttgtcctggcaacacaaacgctttgcagaccacatcgaagcagccaatcaaaccggactgcccgttatcgtccatacgcgtgatgcggcggcggacaccttgtctatcctgaaagaatgccgggttaattcgggcgttatccactgtttttccgaagacatcggttttgcccgtgcagcaatggatttggggctttatatttctttctcgggaatcgttacctttaaaaacgcacccttggttcaggaggcggcgaaatatgtgccggacgaccgcattttggtggaaaccgatgcgccgttcctcgcccccgttcccaaacgcggcaggcagaacgaaccggcttttgtgcgccataccgccgaacatatcgccaaattgcggaaccaaacattggaacaggttgcggcatatacgacggaaaacttttaccggctgtttaaaaaagtacccgatatgcggaccgtctgaccctgtaccgacgataaggaaaaccatgaaggcaattcatccgtatgcatgtccgcgctgctgccggctgcctgccaacacgtttcggacaggcatggcaaattccgcttccaaattctgcattgccaaaggcggcagacgggaagcaaaaaaagacgaaagcggcggcggatatgccctgtgccatttgccggacagcaggattgtcgaggagtgggaatatttccgttcacaatattgatactgcgcgatatacggcaaatattgtgggaagtttccgcttttgcgtataatgcgccctacctgacaaattttgtcaactttatcaaaaggaataagcgatggcttccatccacgaccaaattaaagaagtagtaacgacacaccgcgtcgtattgtttatgaaaggtacgaagcagtttccgcaatgcggtttctcttcccgcgccgtgcaaatcctgaacgcggcaggctgcaccgattacgttaccgtcaacgtattggaaaatcccgaagtgcgccaaggcattaaggaatacagcgactggccgaccatcccccaactttatgtgaacggcgagtttgtcggcggttcggacatcctgatggaaatgtatgaggcaggcgagctgcaagagctgctgaaagcctgatggattcggcaatgccgtctgaacgtgtttcagacggcattttcttttccggcaaatcaaaaaaaagtataatggcgcgtctcaaaatcacattggaacaccgcgatgaacgttaatgttatcaaccatccgctcgtccgccacaaattaaccctgatgagggaggcggattgcagcacctacaaattccggacgcttgccaccgagctggcgcgcctgatggcatacgaggcaagccgtgattttgaaatcgaaaaataccttatcgacggatggtgcggtcagattgaaggcgaccgcatcaagggcaaaacattgaccgtcgttcccatactgcgtgcaggtttgggtatgcttgacggtgtgctcgacctgattccgactgccaaaatcagtgtagtcggactgcagcgcgacgaagaaacgctgaagcctatttcctattttgagaaatttgtggacagtatggacgaacgtccggctttgattatcgatcctatgctggcgacaggcggttcgatggttgccaccatcgaccttttgaaagccaagggctgcaaaaatatcaaggcactggtgctggttgccgcgcccgagggtgtgaaggcggtcaacgacgcgcaccctgacgttacgatttacaccgccgcgctcgacagccacttgaacgagaacggctacatcatccccggcttgggcgatgcgggcgacaagattttcggcacgcgctaactgactgattttcggagttgatatgaattttcaagactatctcgccacatttccttcaatcgaccatctgggcggtttggacgttcaggatgccgacggcaaaacggttcaccacattcctgccgttcagggtaagctcggttcgctcaagctgtacaatgctttggcggaacgttttgacggaaaattgggtaaagaagcggcagaacagggtttgatatggtttgccgaacacgttgccgacgcgcgtgcccatccgggcaagcatccgaacatcgatctgctggaaaatgtcgtgcaaagcggtgaaacctggttgctcaagccgctttccgcgcaataattttcgaccatgccgtctgaaatccgtttcagacggcattttgtcggaaagaagaccgtaaaacgggcattttcttttctatttcaggatacgggcaatgatgtttcaacacacaggacgacacataaagcgccgccctatgtgttgccctaatttggaaggggttacacccttttcaaataaaatctgatgctgctgccacgaaggacggatgtccgagtggcggggtttcaaccattaaggaaatacgatgaaaaaaatgttcctttctgccgtattgcttctgtcggctgccgcccaaaccgtgtgggcggatacggtgttttcctgtaaaacggacaacaacaaatacatagaagtccaaaaaatcaaccgcaatctttacgaatattcgttcggcagtgcggcaaaaaaagaaattgccatacgcaacagcaaagctgacctgttggggcgttccgacaggtggcaaggtatgggcagcggtcgttgggcaacgatgaaattccaaaacggcgaatttatgtacaccatatggacaggcttcgattccgtgactcatacggaaagcagcggtgtcgttgtggagcgtaggggcaaggaagtcgcacgggtcggctgtacgccgaaaaccgcgcaggcgaatttcaacgatgacgatttttcctagtaatcggggcggataaggcgatggaaacagcgaaacccgtcatgctgattgtccgtccgtcgggcagggccgcagaagatgtcgaaacttgcctgaatgccggttggcgcgcggaagtattgagtccggtcgaaatcgaagcagatgctgccggactggaacttttgtccgaacaatatgcccgtgcggatgccgtgttttgggtcagtccgaccgccgttgaaaccgccgtcccgtaccttaacctttcagacggcataaaggcgcagattgccgtagggcagggcagccgccgcgcattggaacgctgtttggtcagaacggtcatcgcgcctgatgacggcaacgacagcgaggcggttttgcgcctgccggtttggaacagtctgcccgaaggtgcgcgcgtattgtttgtgcgcggacacggcgggcgggattttttgatgaatgccttgcaggagaaaggttttcggacggaggtggcagaagtctatttcagacggcataaacctttgaactttcaaaatttccaaaccgaaaatattgccgccgcctatattacgtcgaccgagctggtgcgcttgctgttcgggcagcttccgccgcaattttcccgattcttcaaatccttgctatactttacccatcatccgcgcattgcggaggcattgaagcgcgaaggcgtgtgttcggtcgaaaccgtccctacgctggaagccgcgctttcccattcttccatttccgtttcagacggcatggtctttcccggaacctcaaattaataaggagcaaaacggtgggcgaacctgaaaacaaatcatccgaacccgtacgcgagatacaggcatcaaaagaaatgccgtctgaaacctcttccccacgcaaagaaaacgaaacagaagtacacattcctgccgctccttttatcgtcaaacagtccggcagcaacgctttggcagtctgcgccctggtattggcggcattgggtttgggtacaagtggttttttgtttgtccaaggacagaatgtcttgaaaaaccaagagctggcattcaaccaaaaaatcgacaaagccgccttgggcgagtcggaaaacgccgccctgttgaaagacaacctcaaccggcaagccgccatacaatcagagctcgaccgtttggacggaaacgtcaaagcaaacggcgaacaaatcttggaaatgcaaaaatcctatcgcgagttgaccaaaggacgcgccgattggctggtggacgaaaccgagaccatactcaatctggcggcgcaacagctggtgttgactggcaatatccaaacggcagtcggcgtattggagcatatcgacagccgcctgtcccgtttcaatcaggcagagcttctgccgatcaagcaggcggtcagcagcgacttggcggaactgaaaaaccgtccctatgtcgatatttccggcacggcattgcgcctcgacaggctggaaaccgccgtatccggactgccgctgatgctcgacggcgtgctgaaaccgggcgtacaggtgaagaacgaagccgcttccgcttcatggtggcagaacgtatgggaaaaatccctcggcacattgaaggggctggtcgaaatccgacgtttggaaaacaacgatgccatgctgatttctcccgaacaggcatattttgtgcgtgaaaacctgcgcctccgccttttggatgcgcgcactgcattaatgcagcgcaacagcgaagtctatcagggcgatttgaacaatgccgaagccgccgtcagacagtatttcgatgccaagtctcccgccacgcagtcgtggctgaaagaactggcggaattgaaggcgttggatgtgcggatgactgcggatgacggtttgaaaaacagcctaaatgccgtccgcgcctatcgcgacggtacgcgcatgacggcggcggaaaatcaagaagcggaacaggcggcttccgaaccggcaaacgaaaaaacagcttccgaaccggctgccgcatcggatgtgaagaccatagaagcaccgtccctgccttcggaacgcaaaccggaacagcctgcaaaaaaacagaccgtaccggaaaaggcagggcgttcgccgtccgctaaaggagaacgcgcatgaaaacggtagtctggattgtcgtcctgtttgccgccgccgtcggactggcgctggcttcgggcatttacaccggcgacgtgtatatcgtactcggacagaccatgctcagaatcaacctgcacgcctttgtgttaggttcgctgattgccgtcgtggtgtggtatttcttgtttaaattcattatcggcgtactcaatatccccgaaaagatgcagcgtttcggttcggcgcgtaaaggccgcaaggccgcgcttgccttgaacaaggcgggtttggcgtattttgaagggcgttttgaaaaggcggaactagaagcctcacgcgtgttggtcaacaaagaggccggagacaaccggactttggcattgatgctgggcgcgcacgccgccggacagatggaaaacatcgagctgcgcgaccgttatcttgcggaaatcgccaaactgccggaaaaacagcagctttcccgttatcttttgttggcggaatcggcgttgaaccggcgcgattacgaagcggcggaagccaatcttcatgcggcggcgaagatgaatgccaaccttacgcgcctcgtgcgtctgcaacttcgttacgctttcgacaggggcgacgcgttgcaggttctggcaaaaaccgaaaaactttccaaggcgggcgcgttgggcaaatcggaaatggaacggtatcaaaattgggcataccgccgccagctggcggatgctgccgatgccgccgctttgaaaacctgcctgaagcggattcccgacagcctcaaaaacggggaattgagcgtatcggttgcggaaaagtacgaacgtttgggactgtatgccgatgcggtcaaatgggtcaaacagcattatccgcacaaccgccgccccgagcttttggaagcctttgtcgaaagcgtgcgctttttgggcgagcgcgaacagcagaaagccatcgattttgccgatgcttggctgaaagaacagcccgataacgcgcttctgctgatgtatctcggtcggctcgcctacggccgcaaactttggggcaaggcaaaaggctaccttgaagcgagcattgcattaaagccgagtatttccgcgcgtttggttctagcaaaggttttcgacgaaatcggagaaccgcagaaggcggaggcgcagcgcaacttggttttggaagccgtctccgatgacgaacgtcacgcagcgttagagcagcatagctgattttgggaaatatctttatctgggagaatttgatggggtcttcagattcctttaaggaaaagaaagaaatatttgaaattggaacgcctgcttatcgccaaaagttaattgatgtttggaaaaagagcattaatggaaacgaaaaatcttgggtgctctttgaaaatgggacttgcgtcattttacttgaaccggaaaaagatttggcgaaacaagctaaagagatgttaagcaaatggggcaaggttcaaataggaacaccatctgcagattttggcattatcactttagatagtggcgatggatatgccgtttcatgccatcatcccgaaatttttacgctaatcctaaaagaagaaggattggatgaagatttcaaaatcggtatcgaagggcgctctcatcgcgattgtgatgctgaagaacccaaagttatccatatcgaagataaacgcaccattgaaaccccatgaaaacctgctgccgtttaatcatctactgatgattacttaggcaaatgtgcccgtccctcccttttcagacgacctttcattgcggaaaccgccgcaaaggttgtctgaaaaccgttttccttccccgttttacaaacaaaccgaaagccccacatgatctctttgaaaaacgacactttcctccgcgccctgctcaaacaacctgtcgaatacacgccgatttggatgatgcgccaggcggggcgttatctgcccgaatacaaagccacacgcgcgaaagcgggcagcttcctcgatttgtgcaaaaacaccgaattggcgaccgaagttaccatccaacctttggaacgtttcgatttggacgcggcgattttgttttccgacatcctgaccgtccctgacgcaatgggcttgggactgtattttgccgaaggcgaaggcccgaaattcaaacgcgccctgcaacacgaggccgacatcgccaagctgcacgttcccgatatggaaaaactgcaatacgttttcgacgcggtaacttccatccgtaaagcattggacggccgcgtaccgctcatcggcttctccggcagtccgttcacgctcgcctgttatatggtcgaaggcggcggcagcaaagaattccgcaccatcaaaaccatgatgtactcgcgccccgatttgctgcacaaaatcctcgataccaacgcccaagccgttaccgcctacctcaacgcccaaatcgacgcgggcgcgcaggcggtgcagattttcgacacttggggcggcgtgttgagcgatgcggcgtttaaagaattcagcctcaaatacatccgccagatcgtcgccggactcaaacgcgaaagcgaaggccgccgcgtgcctgttatcgtatttgccaaaggcggcgggctgtggctggaaagtatggcccaaatcggcgcagacgcattgggcttggactggacgtgtaacatcggcgaagcacgccgccgcgtcggcaagcaagtcgccctgcaaggcaacttcgacccgttcgccctcttcggtacgccggaatccatccgcaccgaggtcgcacgtatcctagccgactacggacacggcagcggccatgtcttcaacctcggacacggcatcaaccaacacgccgaccccgaacacgccaaaatcttagtcgataccgtacacgagctgtctcggcagtatcacggcgggtaagccggcaggaaaccgcccgatatgccgtctgaagccgagagatggccggttagggtaaaaataaggcaatgcggcaatatccgccgtgtacggatagtacatgacggcggcgttgtcgtattggcgcaatcccaaccgtccctatgttcagacggcatttttgttttcagatgcagggaaaaccgatggcaaaaacgcttaaaaccctttaccaatgcaccgaatgcggcggcacttcgccgaaatggcagggcaaatgcccgcattgcggcgagtggaacacgcttcaggaaagccttgccgcgcccgagccgaaaaacgcccgtttccaatcttgggcggcggatacctcgaccgtccaatccctctccgccgttaccgccaccgaagtgccgcgcaatccgaccggtatgggcgaactcgaccgcgtattgggcggcggtttggtcgatggtgcggtcatcctgctcggcggcgaccccggcatcggcaaatccacgctgctgttgcaaaccatcgccaaaatggcgcaaagccgtaaagtgctatacgtttccggcgaagaatccgcccaacaagtcgccctgcgcgcgcagcgtttggaactgccgaccgacggcgtaaaccttcttgccgaaatccgcatggaagcgattcaggcggccttgaaacagcatcagcccgaagttgtcgtcatcgactctatccaaaccatgtattccgaccaaatcacgtccgcccccggctccgtgtcgcaggtgcgcgagtgtgccgcccaactgacgcgcatggcgaaacagatgggcatcgccatgatactggtcggacacgtgaccaaagacggcgcgattgccggcccgcgcgtgctggaacacatggttgataccgtgctgtatttcgagggcgaccaacattccaactaccgcatgatacgcgccatcaaaaaccgcttcggcgcggcaaacgaactgggcgtgttcgcgatgacggaaaacggtttgaaaggtgtgtccaacccgtccgccatcttcctcgccagctaccgcgacgatacgcccggctcgtgcgttttggttacacaggaaggcagccgcccgcttttggtcgaaattcaggcattggtcgatgacgcgcacggcttcacgcccaaacgcctcaccgtcggactggaacaaaaccgtcttgcgatgctgcttgccgtgttaaaccgccacggcggcatcgcctgtttcgatcaggatgtgttcctcaacgccgtcggcggcgtgaaaatcggcgaaccggcggcggatttggcggtcatcctcgcgatgctttccagcttccgcaaccgccctatgcctgaaaaaaccgtggttttcggcgaaatcggcttaagcggcgaagtccgccccgtcgcacgcgggcaagagcggctcaaagaagcggaaaaactcggcttcaaacgcgccatcgtccccaaagccaatatgccgcgcaacgccaaagagtttccgaacctgaaaatctacggcgtttcgagtttgcaggaagccatcgatatttgccgcgacagcagggaataaacggaaatgccgtctgaaatcgggtttcagacggcatttggtttgtggcggattgaaacaagaaggcataccggcgacagataagatttgcggcaaagttgcctgtgatgtggcaaaaacacacacgcccgtcatccccgcaagggtgggaatccggaatcgtccgtttcggcaatgattgaaaatcacggtaacccaaccgattggattcccgacttcgtgggaatgaggggcgtgtgcatttgatttccatccgccatatgtcggcgacgggcttattcgcctacggttttttgtatcagtttttcggcgtttgccaaagtgtttgccacttcgtcgaaaccgatgcggctgccggcgatgagggcgcgcgtatcggtataggcggcgcgtactttgccgtccgtttcggtaacgaggacgcgtaggggcagttgcagggcgaaggcggggtctttgaccatcagcggcgtgccggctttgggcgtgccgaagacgatgacttttgccggctgcatcgttaagccgtttcggcgggcggcttcctgatggtcgatgacggcaaaaatgtccatccctttgctttttatggcggtttcaaggcggctgacggtttcgtcaaaactgtattttgaggtgagggtatgcgtggtcatagcggtttcgttttgggtggacggttcgctggcaggatgtgccgaagcggttgaaatgcagagtgcggatgcggcaatcagggggagtatgtgtttcatcgtatttcctttttcctttttggttgaaacggtagaatcagactttattcgggaggggtgtaaccctttccaaatcagggcaacacatagggcggtgctttatgtgtcgtgaaacatcattgttccttatcggtttgtttatcaggcttcggacggggcggcgcgcgccgcgcccgatgttgcgccgcgtgccggaacgccgtatgccgtctgaaagcctgtcctttcagacggcattgcgtcatttcatcccttttttgagcaggtcttcataaccgccgtgattggcaacatttgtataacctgcttttttcagctcttgaagggcggcttcggcacgccgtccgctgcggcagtagaggttgaccggcgtgtctttgtcgggcgcggcttcgtgtatgcggcggacgatttggtcgacggggatgttgaccgcgttgtgcaaatgcccttcgctaaattcctgttcggaacggacatcgatccaaacggccggatgttgcgcggtttgggcggcggatacgggtttttgcggggctgcctgcgcggcaaaggcggctgaggcaatgagtgcggcggtaatcaggtgtttgatattcatagggttttcctgcggttgttgtccgaaaggacgggaagttattttatctgttccaaagcggcggcatctatgtcccaacgccaaacgccgccgcctttgccatccaatccgcgcaaaaacaggtagcggacggaaacggcggcgggcggttgtccgcgcagcttgaagtagcgtgcggcggcaacggcgtaaatcagtgcctgaaggtaatagtggtggtgtgcgacggcttcgtccattgcctgttgcgtgtaggcggatgcgtccgtaccgaggtggtttgatttgtagtcgatgacgcagatattgccgtcggggtcttggcagaccatatcgacaaagccgtttaaaaagccgttgacggtgtggaagtcgagcgtttcggcagcggcacggcagacttcgggcagcctgatgtcgtcgcgggcaaaccagtcgcgcaggcgtttgaggctgaagtcttcggtgtggagggtaaagcccatttcgggacagcggcactcgggtgagatgtcggacaggtcgtatgcccccgtcagcggcgttttgcggcaggcttccgccatttcggcaacggcgggcagccatatttcttcaaaaccgtattttttcagcttgtcggcaatgagggtttcctgtccggcggctgcttgtccgaatttgaaatcttcaagaatttcgtgcaggcacagccccgcctgcgtgcctttcggaaaatcgtgtatcgatatgccgtctgaagccgtcggcgtttcagacggcatcgccggcaccgaggtttcggcggcatccaaggacgggcaggcatcttcttcgccgccgtcgggcgtttgggtatggcggcttaaggcggtaaagctagtgtggcggacaaatcggaatccgcgttcgggaatgctgtttgcggcaaattcggcggtttgaccggcgttgctgcgataggcggcagggggcggcgcattttcggtgaaggcgaaatttgtgccggaaggggcgttgtccgccacgcgccgccagttgcgtttgagcatcgcgatgccgtctttttcacacgcataggcacggcggacggtttcacggctgtcttggggcgagccttcaatcaggtaggcgagggggttgtcggcagtattggtggagtacgcggcgtagatgttgagctgttcctcggcacgcgtcagcgcgacataaagcaggcgcaggcgttccgccatttcttcatcggcgtattgtttctgttcgtcttccgacagttgcgcctttgccaacagttcggttcggtttgcgccttggtggaggatttgccagtcggacggtccggtatcttgcgcgtcccacgcaaacgggcagtacaccagcggatactgcaaacctttcgaggcgtgcatggtaacgattttgaccaaatcttcgtcgctttccagacggatggcgcggttgtcgccgctgttgttttcggcaaggctgatttggtcgcccagccatttgtgcagcgcggcggggttgcggttttgcgcgtcttcggcggcaagcagttcgagcagttggaaataattggtcagactgcgcccgttgttccggcttaagaggcgcgtttcgatgccgtgtgtttgggaaaattgctgcatagcggcgaaaatgccgtatttattccagttgtcgagtgcggttcgggcagattccgcccaatgcaaaatctcgctttcgttttggttgaagtcgtgcaattgctgcgcgtcataaccgaatatgctgcttgtcaggacaaaacgcagcgttccggcgcggcgcggttcgagccagaagccgatgagtgcggacagggcggcggcttcgggcgaggcgaacacagattcgcgcgaaagcaggacgctttgcacctgccgttttttcagggcggcggaaaccatcaccgcctcgttgtgcgtgcgtaccagcacggcaatatcgcccgactgcaacgggcagcctttgaaattcagacggcctctggcggcttcgttgagcgcgtgggcgatttcgtcggcgcaatagtcggcggcacggcggcgcaaaacgtctttgttggctttttcattgtcgttttcgtgcagccaacgaacctgtacggcaggacgttcgggggacagcctgctttcggcacgcgccgcaccgacttccgaatagccgatgttttccaaaacgaacgggcgttctttgaggcggaacagcgcgcctatgctgccgataagcgcggcgtggctgcggtagttggtggcgagcgtgtagcggtgccgcgcgtcttccgccgcctgaaggtaggcgtaaatgtccgctccgcgaaagctgtaaatcgcctgtttgggatcgccgacgaggaacagcggtcggttttgggcgatgaaaatcttttggaagatttcgtattgcagcgggtcggtgtcttggaactcgtcgatcagcgcggtttcccagttttcggcaacggcgcgggcgagagtgtcggcgtgcggattgtcggtcagcgcggtgtggacatcgagcagcaggtcgtcgaaaccgcgttcgcggcgcgattttttcatctcggcaaggctgcggttgaggtattcgattaaatccagttgcagccggatcattgttgcttcttccgcttcttcgagtgcgttcaaatcgcgcccgaagtctgccagtttctgcaattcggcaaatactgccgcatcgggcgttttgccttttttcagtccggcttcgagtttgtcggatgcaagtttcaagagtctgtcgtgtgtgtctttgtccagaaagggcagttgtccggcggcggatttttgtgccagttctttaaaaaggttgccgaagctgtttttgcggtaactgttgccgttgaggtcgggatgaatgcgccaaaagccggcttccagttctggcagcaggcggcagatggtttgccatgaggtttcggcgttgcgctgcgcctgtttcaaatccgcctgcggacggcggaaattcaggtacgggcgggaaagatagcgcgaaatttgggcaaggacggtttgcggcacagctttgcgtttaagcgccaatgcggcaagcaccggatcattgctgacgcgttcccgccaaaaatcttgcgccgggataagcaggcggtcgccgtcttcttcggtcatttcgacatcgaacggtgcttggcacaggaaggcgtagtcgcgcaggatgcgctggcagaagccgtggatggtatagatggcggcgttgtcgaattgcccgatggcggccttgaggcggacaatcagacgcgtccggccctctttttgcaaagcctgttttaagagttcgggcaggaaggtgtcgccttcgtggtgttcggcgcagtaggcggcaatgccgtctgaaagcgtgtcgtctccaagtttggcaattcctttgctttctaaaacttgtaacacatcgtccaaacgcccgcgcaggcgtgttttcagctcggcggtggcggctttggtgaaggttacgaccaatacgcgttcgacgtttttttgttctaatacgatcaggcgtgtaaacagggcggcaatgccgtaggttttgccggtgccggcagaggcctcaatcaggttggtgccggaaatggggacggttagcgggtcgaatgcttggatgcttgcagacatagtgcgcgctcggaaaacggttggacggtaaaacgggaaaatgccgtctgaaaaatggtttcagacggcatcgtccggcttagaggttttgcaggcgttcgacagacggcgcgtagtagtatccgcccgaaacggcggcggagagatgtcggagcagcaggtcggttttgccgtccgtatcgccgaacatactcaataattgcgcttcgatattgtgcagcgtgcggcagtatgcggtaaacatcaaaccgtgttcgccgctgattttgccgaagggcaggctgcggcggacgattttcaggccgactccgttttctttcaggttgacgcggccgaggtgcgaatcgggcaggcggacatcgcggccgaattcgtcgtcggtttccttgccgcgtccgaccgaggcctcctgttcggcgacggggacggcatcccattttttcaaatcgtgcaggtatttttgcagcaggacatagctgccgcccgcatcgggttttccttcggggatgatggcgacttcgcggacattttcatcgccctgcgggttttccgtgccgtcgacgaaaccgtccagcccgcgatcctgatacaggcgcaaaccgtgttcttcggacgcgacgcatatgctgtcgccgaacgcgcccaaaacggattgggcaagcgcgtaggcggcgttttggcggaaggattggatgtggatggacatatcgtgctgcgtggacggcgcaagcccgttgcccatttcggagaagggtttgatttcactgccttcgtccgtatgtccgaatgttgcccaggctttgctgccgaaggcgatggtcagacccaaaatatcgtccggaaagcgggctttcaaggcagttaacgcgtcgagcgaagcgcggcaggcggctttaatatcgttgaggcgattggcggcgaagtcggcttcgataaagatgccggcttgggcgtggtcgggaatgatggcggattggggcgtgttcatgagatgttcctttttggtgtcatctgtttcggatagattatagcaccgaatcggcaggcggatttttgccggaacggcgtgcgtgaatccgccgtttacatacctgatgccgcttttcggtttcgtgccgcccgccgcctttcccgccccctttatttccgcttccggcggcttcggcatatcttttccattccgatttggaataaccatataaaaaaagtattctttgtgtttgccgcaatttcacttagaatgccgcacttgcacactttttacaggagaggatgatgttgaaaaaattcgtactcggcggtattgccgcattggttttggcggcctgcggcggttcggaaggcggcagcggagcatcttccgcgcctgcacaatcggcagtttccggttctttaatcgagcgcatcaacaataaaggcacggttaccgtcggcacggaaggcacttacgcaccgtttacctaccacgacaaggacggcaaactgaccggttacgatgtggaagtaacccgcgccgtggcggaaaaactgggcgtgaaagtcgagtttaaagaaacgcaatgggattcgatgatggcgggtttgaaggcggggcgtttcgacgtggtggcaaaccaagtcggtctgaccagccccgaacgccaagcgacattcgacaaatccgatccttacagctggagcggtgccgtattggttgtccgtaacgacagcaacatcaaatctatagccgacatcaaaggcgtgaaaaccgcacaatccctgaccagcaactacggcgaaaaagccaaagctgcaggcgcagatttggtggctgttgacggtttggcgcaatcgctgaccctgattgaacaaaaacgtgccgatgcaaccctgaacgacgaattggcggttttggactatctgaagaaaaacccgaatgcgggcgtgaaaatcgtttggtccgcacctgccgatgaaaaagtcggttccggcctgattgtcaacaagggcaatgacgaagccgtggcgaaattcagtacggcaatcaacgagctgaaagccgacggtacgctgaaaaaactgggcgaacaattcttcggaaaagacatcagtgttcaataatttccttgcttcgctgccgtttatgacggaaacacgcgccgatatgattgtcagcgcgtttttgcctatggtcaaagccggcttcgcggtctctctgcctttggcggcagcttctttcgttatcggtatgatgattgcggtagccgtggctttggtgcggattatgcccgccggcggcatcgtgcggaaaatcctgctgaaattggtggaattttatatttccgtcattcgcggtacgccgctgttggttcagcttgtgattgtgttttacgggctgccttccgtcggcatctatatcgacccgattcctgccgccatcatcggcttttcgctcaatgtcggcgcatacgcttccgaaaccatacgcgcggcaattttgtccgtacctaaaggccaatgggaagcaggtttctccatcggcatgacctatatgcagacgttccgccgcattgtcgcgccgcaggcattccgcgttgccgtgccgcctttgagcaacgagtttatcggtttgtttaaaaacacctcgctcgcggcagtcgtgacggtaacggaattattccgcgtcgcgcaggaaacggcaaaccgcacttatgactttttgcccgtctatatcgaagccgctttggtttactggtgtttttgtaaagtgctgttcctgattcaggcgcgtttggaaaaacgtttcgaccgctacgtcgccaaataaggagttgtcatgattaaaatccgcaatatccataagacctttggcgaaaacactattttgcgcggcatcgatttggatgtgtgcaaagggcaggtggtcgtcatcctcgggccttccggctcaggcaaaacgacgtttctgcgatgcctaaacgcgttggaaatgcccgaagacggacaaatcgagttcgacaacgagcgaccgctgaaaatcgatttttctaaaaaaccaagcaaacacgatattttggcactgcgccgcaaatcaggcatggtgtttcaacaatacaacctctttccgcacaaaaccgccttggaaaacgtaatggaaggaccggttgccgtacagggcaagcctgccgcccaagcgcgcgaagaggctctgaaactgctggaaaaagtcggcttgggcgacaaagtggatttgtatccctaccagctttccggcggtcagcagcagcgcgtcggcattgcccgcgcattggcgattcagcctgaactgatgctgtttgacgaaccgacttccgcgctcgatcctgaattggtgcaagatgttttggataccatgaaggaattggcgcaagaaggctggaccatggttgtcgttacgcatgaaatcaagttcgccttagaagtggcaaccaccgtcgtcgtgatggacggcggcgttattgtcgaacaaggcagcccgcaagatttgttcgaccaccccaaacacgaacggacgcggagatttttaagccaaatccaatctaccaagatttgattaagcatttttcctgtgtttacagaggccagattagattcggattgctttcgatgacggctttgaattggttttgaatccgctcgatggcttcttgcgtatccgcctcaaaacgcaacaccagaatcggcgtggtattggaagcacgcatcagaccgaagccgtcgggaaattcaacgcgcagaccgtcgatggtgatgatttcggttgcgccttcaaattcggctttggcggcgagttcgtcgataacctgatggccgttgctgccttcgggcagggcgatgttgagttcgggcgtggaaatgctttgcggcaggttgtttaacacttcggacggattatcggaggcagacaggatttccaagaggcgtgcgccggcgtacagaccgtcgtcgaagccgaaccagcgttctttgaagaagatgtgtccgctcatttcgccggcaaccggcgcgccggtttctttcatggcggatttgataaagctgtggccggttttttccattatggctttgccgccgtgttctttaatccaaggcgcaagcaggcgggtggacttcacgtcgaaaatgactttcgcgccgggattgcggttcaaaacgtcttgggcgaacagcatcagttggcggtcgggataaataatgttgccgtctttggtaaccacacccaagcggtcggcatcgccgtcaaacgccaagccgatttcggcatcaccgtttttcagcgcggcaatcaaatcttgcaggtttttcggtttggatgggtcgggatggtggttggggaaagtgccgtccacgtcgcagaaaagctcggttactttgttgcccaagcctttgtagagtttgccggcaaacgcgccgcccacgccgttgcccgcgtcaatggcgatgttcatcgggcgtttgagcctgatgtgtccggtaatgtgtttgaggtattcgccggagatgtctttttcggtgacgctgccttgtttgccggcggcagcaaaaccgtctttttcaatgatggacaaaagttcttggatggcttcgccggcaagcgtgtcgccgccgagcatcattttaaagccgttgtaatcgggcggattgtggctgccggtaatcatcacgccgctgccgccgcattcgttgacggcggcgaagtagagcataggagtggcaaccataccgacattgaggacattgatgccgctgtcggtaaagccgcgccggatgtgttccatcagttcgggaccgctcaagcgtccgtcgcgtccgagcgcgatgcgggtaatgcctttttcggcggctttggcggcgatggctttgccgataaggtaggcggcttcgtcggtcagggttttgccgacaataccccggatgtcgtaggctttgaagatgtcgcgggcgatgcttgccataaggtttcctttgtgtccgtttaggaaaaacgggcatattttaacatagcggtatgccgtctgaaggcttgcgtccggttttcagacggcatagcacggttacatcaaataacatgccgtctgaaataaaagcagcctttgtgcaggctgctttcggattgtcggtttataccgcttcggctttaatgatgacgacaggttcgctcggtacgtcgtcgtggtaaccatgacgtttggtagaaacgccttcgatggcatcgacaacgtcaaaaccgtcaacgactttaccgaatacggcatagccccagtcttggacgacggttttgccgtacagctctttagaacggaagttcaggaaagcgttgtcggcagtgttgatgaagaattgcgcgctggcggaatgggggtcggaagtgcgtgccatggcgatggtgtatttatcgttgggcaggccgttggacgcttcgttttgaatcggatcgcgggtttctttttcgttcatgttttcatccatgccgccgccttgaatcatgaagcctttgatgacgcggtggaagattacgccgtcgtagaagccgtctttgacgtattgctcgaagtttttggcggtaacaggggctttgtcgaaatcgagttcgattttgatgtcgcctttgttggtgtgcaggataatcatgggtttcctttcgttagaatctggttttgaatgattcgacaaattgtgtctgaacgacaaacttcaaggtcgtctgaaaaatattctttcagacggtcttgttgtttaggtcgatggtttacatcagtacagcataagcccacagagcaaccaatactacgcagaggatgttcagcagtatgccgacattcatcatttcgcgttgcttgattaagcccgtgccgaacacaatcgcgttaggcggtgtggcaaccggcagcatgaaggcacaagatgcgccgatgccgatgacgaataccaagacttgttcgggcagccccatctgcatagcgatgccggagaaaatcggtacaagcaatgcggcggaggcggtgttgctggtgaactcggtcagaaaaataatgaaggcggcgacgatgagtatcaccaaaaatgcgggcgcgccggaaaaggtggcggcaacctgctgtcccaaggcttcggacgcgccggatgttttcaacagcgtgctcaggctgatgccgccgccgaagagcatcaacacgccccagtcggtattgcgggcgacttccttccattgcgccacgccgaagacgacgacggcgacggcggcactcagggcgataacggtgtcgggattggaaatgccgaaggcggttttgattttggagctgaatatccacgcggcggctgtggcaaggaaaatcaacagcgcgatcacgcggtgcagcgtccaagggatggattcggctttgatttccacgcgttcgttcaaattaggtttgaggatgacgtacagggagagcagcatcaagggcagaatcaacagcatcatcggcaggccgagcttcatccagccgacgaagtccagatttagggctttggcggcaatcaggttgggcggcgagccgacgagcgtgcccaagccgccgatgctggcgcaataggcgatgccgagcaggaggaagacgtaggttttgtgttctttttcctggtcgaggtggctcagcatacccattgctagaggcagcatcatcgcggcggtggcggtgttgctgatccacatggacagaaaggcggtaacgaggaacaacatcaaaaccgccactttcatattgccgcgcgacaggcgcaacaggctgacggcgattttacggtccagccgctgcatatgcagggcggtggcaagcgcgaagccgccgaaaaaaatgtagataatcgggttggaaaaatcagccatcgcctttttgatgtccatgtcggggaaaccgagtacgacggcgagaatcggcaccatcagtgcggttacggtaatgtggacggcctcggtaaaccaaagtgcggcaacgaaaatcagcagcgcgatacctttattggcatcggggctgtaaggcaggatgtggtaaatgccgaaacagacgacggcggaaataatggtggtcagcaggcccttaaagtcggtaatcggcttctgcgcactgagcagctcgacgttttcgggatgctgggttttgtcctttgcatgcaggttcatgaatactcctttaaggcaacaaaatcggtttttcttttgtgtcgtgcaatccgaaacggtttgtggaatcgccgcttctgcaactggttcgagtatatttgtaatctgatgtagtgtaaatatattgtaaacgatttgtcggttttgtttatgagatgggattgatatgtaaggggaaaaataggatatatcgggaagaggtgcatcctgtttggggaaaataaaccgatttagtccgggcggcaggcagctcgcgcggtaaagagggcaagggctgcgcccgtcaggtcggcaaggacatcgcccaaactgccggttctcgttgcggtaaaccatgcctgcgcgcattcgctgaagagggcgaaacagagggcaaagaccatcaggctgcgataggggatggggcggttgtcggttctgaatgctttggtcagaagccagatttgtgcgaaaaacagggcgaggtgcgccactttgtcaaaatgcggaaaaggcggtggcgcggtttcggcagctttgaaaagcagtgagtaaatgctgcctgcaaaccacaatgccgagagcaggataaagcggttgcgtggcagattcatgcttgttcctcttcaagccatgtctggcatagtttggataggcgcaggaattttccgccgcgtgcggccagcatatcgcgccaaacggcaatttcttcggcggagggggcatcgtctatgctgcattcgtagagcaggaaatcgagggtttcttcgatgacggggatggattcggtttggataagctgcttgagttcggtcatgactgttcggatatggaaatcgggaacatgccgtctgaaagggcttcagacggcatcgggtcatttgctgtgcaggaagcgggttgcttcttcccatttgccggcaaggatgtcgggtatggcttgcagggatttggcgacggcatcgtcaatctgtcggcggtgttccgtactgggtttgttcaggacatagccgacgacgaggttgcggtcgcccgggtggccgatgccgaggcgcaggcggtaatagtctgccgtgccgagttttgcctgaatgtctttcaagccgttgtgtccgccgttgccgccgccgagtttgaatttgatccgtccgcagggaatgtcgagttcgtcgtggacgacgaggatttcttcgggtttgattttgtagaactgtgcaagcgcggcaactgcctgtccggaacggttcatgaacgtggcaggtttgagcagccaaacgtcgccgtcgggcagggcggcacgggcgacttcgccgaagaattttttttcttctttaaatgaagccttccatttccacgccagttcgtcgaggaaccaaaaacccgcattgtggcgtgtctgttcgtattctttgcccgggttgcccaagccgacaaccattttgattgtgtttgacatgatattttccgtgtttctgtcgaatgctgtctgaaggcttcagacggcatggttattcttcttgattttgaacgcgtttgcggcgcgcttctttggggtcgatcaacagcgggcggtacacttcgatgcggtcgccgtcgcgcagcggcgtgtcgtctttgacggctttgccgaaaatgcccaaaggcgcggaatgcaggtttaaatcttcaaatatgccgtccaaaccgctttgcagtgcggcggcgcggacggttgttccctcggcaagctgcatggttttcaaaacctgtcggtcgggcagcccgtacacaatctcaatttcaagcataacggcggtctgcctctttgacgaacgcttcgaccagcgtggtggaaaggtggttgaagacgggggaaattaaggcggacaaaacggcattggaaaaatcgtattccaaattgaattcgattttgcacatatcgtcgcccaaatcgataaatttccacgttccacgtaaggttttgaacggaccctcgagcagttccatacggatttccctgcccggaatgttgcggttgtgcgtggcaaacgattggcgaacgtgcatataatccataaacagccgcgccttcagttcgttgccgctacgcccgatgacttcggtcttgctgtaccacggcagaaagtgcggatagtcttcaaccttgtcgaccagctcgaacattttgtccgcgccgtgcagcaccaagatgtttttttcaacttttttcacgggcatcaccaatgcgggcgtgtattcgaagggcggtattatagcggtttaattttaaaccggtacagccttgccccgttctgatttcaatttaaaccgccatatcgcagattcgtaaaaaccgatacggctttggcgtttcagacggcattgagtggaaaatgccgtctgaaaacgggatgggaaaacggcagcttgcgggctgccgtttgttcgggaagttaagccttgttttcaggctgctgctcggactctgtcgaagcggtgtctgccggggcaggtgcttcggtttcttcccgagtcggagcgtgcggcgcgttatcttccgccgcgtccgcattctcgcgcaggttgtggctgtaatctttgggcgggctgggttgtttgcccgccatgatttccagtacctgatcgcggtcgatggtttcccattccatcagggctttgcacatcgtttccatcttgtcgcggttttcatcgaggattttgtaggcaacctgatattgctcgtccaaaatccggcggatttccgcgtcgatgtcctgctgggttttctcggaaatgttttgcgaacgggttacgctgcgtcccaagaagacttcgccttcgttttccgcataaaccatcacgcccattttgtcgctcatgccgtagcgcgttaccatttcgcgcgccatttgggttgcgcgttcaaagtcgtttgatgcgccggtggagatgcgtccgacgaagatgtcttcggcaatccgtccgccgaacaggatggagagctggctcaacatctgatctttatacatactgatgcggtcgcgctccggaagctgccaagtcagacccagcgcacgtccgcgcggcataatggttactttgtggacggggtcggtaaagggcaggctttcggcaacaatcgcgtgtccggattcgtgatacgccgtcgcacgtttttcgtcttcgtgcatcaccatactgcggcgttccggacccatatagattttgtctttggcgtcttcaaaatcgctctgatcgactttgactttattgcggcggccggcaaacagggcggcttcgttgaccaagttcgccaaatccgcgccggaaaaacccggcgtgccgcgcgcgagggacaataaatccacagattcgtccaaaggcacttttttagaatggacgttcaaaatctgttcgcgccctcggatgtccggcagggggacaaccacttggcggtcgaaacggccggggcgttgcagcgcaggatcgagtacgtcggggcggttggttgccgcaatcacaattacagtctgattgctctcaaaaccgtccatttcaaccaacaattggtttaatgtttgctcgcgctcatcattgccgccgcccaaacctgcgccgcgttggcggccgactgcgtcaatctcgtcgataaagatgatgcagggggcgtttttcttcgcctgctcgaacatatcgcggacgcggctcgcaccgacaccgacgaacatttcgacaaagtcggaacctgaaatgctgaagaacggcacgccggcttcgcctgcaatcgctttcgccaaaagcgtcttacccgtacccgggctgcccgccagcaggatgccgcgcggcacgcgcccgcccaggctttgatagcggttcggcgctttgaggtaatcgacgatttcctgtacttcttctttggcttcgtcgcagccggcgacatcggcaaaggtcactttgttggcatctttgtccagcaggcgggcgcggcttttaccgaatgagaatgcgccgccttttccgccgccgcccgtctgcatacgcatgaagtagaaccatgcgccaatcagcagcaggacgggcagcaggctgtaaaacagggcagccagcgcgctcggtttttcttccggcgttacttttacgcggacgtttttgtcgagcagtgttttaattaggttgtcgtccaaaggcgcgttggtgaagaaagtgcttttgtcggtgcgctcgcccttaatcaggtagccgctgacgacggatccttcgatgttgacgccggatacttcgccgttgttgacctgttggatgaactgagagtattcgatttgcccgttgtcttcttttttaccgtctaaagcgttgaacgcagccatcaggccgatacccaaggcgacccagacaaggattgatttaaaggtgttccccacttagcaaggctccataattgaggtgtaaaacggaaatgattgtaaagcacgccgtctgtattgtcagcgtttatttttgcccaataaataaatctcactggagcgattgcgcgaggcttcgggtttgcgcgtctgcaccgtgccgaaaatttcgcgcatggctgccatgtattcctgatagcctgcaccctgaaagactttgaccaaaaagctgccgccggttttcaggtgttgcgaggcgaagtctaaagccagttcgcacagataaaagctgcgtgcctgatcgcttacggcgtttcccgacatattgggcgccatatcgcaaattacaaggtcgagcgggcggttgtccaacaaggtttcgaattgtgccagtacgtcgttctcgcggaagtcgccctgaatgaaggagacgccccctatggcttccataggcaggatgtccaaggcgaaaactgctccggaagtacccgtcagcttggcggcaacctgcgaccagcttcccggcgcgctgcccaagtcggcaagtaccgtgccgggtttgattaatttgtctttttcgttgatttccaaaagtttgtatgcggcacgggcgcggtagccgtctttttgcgccatatggacgtagtggtcgttgacgtgttcgtgcagccacgcttttgaggatttggaacgtacagccatagtggttcgcgggtcggaatggaaaccgcgtattgtacgttaattttgccgatgtcgtgccaaatcgcgtacaatgccgcattattctttttattcaagcagtaggaaaatgacggataccaaattgaacaccaaagaaattttggaactgaaagcgcgcgcgcaccatctccatcctgttgtgatggtcggtcagcagggtctgacggacgcggtcatcaaggaaaccgatgcggcattgacggcgcatgagctgattaaagtgcgcgtattcggcgacgaccgtgccgaacgtatcgaaatctgcactgccttatgtgaggcggttgatgcgcaactggttcagcatatcggaaaacttttggtattgtggcgtaagaatatcgaagcctgacagcctgaagcagttgttttgctattgttctttaacgggcgggacgccgtccttcggcgcggcatttcggcgggccgaaaccctttccggtgaaaacggattttgattgccgcccgatgctgtctgcaagttgcggcggcttccgtatggtttgaattgttgacaggatgattggagggcttatgcagtttccttaccgcaatgttccggcttcgcgtatgcgccgtatgcgcagggacgatttttcacgccgcctgatgcgcgaacacacgctgaccgccgatgatttgatttatccggtgttcgtattggaggggtcggcgcgcgaggaggatgtgccttctatgccgggtgtgaagcgtcaaagtttggacaggctgctgtttacggcggaagaggcggtaaagctcggtattccgatgttggcactgttccccgtggttacggcaaacaaaaccgagcgtgcgcaggaggcgtacaatcccgaaggactcgtgccgtcaactgtccgcgccttgcgcgagaggtttcccgaactgggcattatgacggatgtcgcgctcgatccttatacggttcacggtcaggacgggctgacggacgaaaacggttatgtgatgaacgatgaaaccgtagaggttttggtcaagcaggctttgtgccacgctgaagcgggcgcgcaggtggttgccccttccgatatgatggacgggcgtatcggtgcgattcgcgaggcgttggaggatgccgggcatatccatacgcggattatggcgtattccgccaaatatgcttctgcattttacggccctttccgtgatgcggtaggcagttcgggcaatttgggcaaggcagataaaaagacctaccagatggatccggcaaataccgatgaggcgttgcacgaagtggcgttggacattcaggaaggtgcggatatggtaatggtcaagcccggtttgccgtatttggacgttgtccgccgcgtaaaggacgagttcggtgtgccgacttatgcctatcaggtttcgggagaatacgcgatgttgcaggcagcgattgccaacggctggctggacggcggcaaagtggttttggaaagcctgctggcattcaaacgtgcgggtgcggacgggattttgacctattacgctattgaggcggcaaagatgttgaagcgttgattttcggccgggttaattgaaatgccgtctgaaaccatggtttcagacggcatttttacagtttacaaagttgtatcgagtgcggcggaaatatcgttccaaatatcgtccgcgtcttcgatgccgatggagaaacgcagcagaccgactttgatgcccatttccattttcacatcatgcggtacgccgctgtgggactgggaatagcaatggttgaccaaactttccacaccgccgaggctggaagccattttgaccagtttcatgtttttaatcacgctgtttgccgcttcacgcgtgtcgtttttgagataaaccgtaaccacgccgccgatgcctttgggcatttgtgttttcgccagttcgtaatgttcgtgagacggcaggccgggatggaacactttttcaatggcaggatgggcttccaaacggcgcgcgatttcgagtgcgttttggcaatgggcgttcatgcgcagagccagtgttttgatgccgcgcaacaccagccagcagtccagcgggccggcaaccgcgccggtatgcaccatcatatcgtgcaaaggctgcgccagttctttggttttggcaacgacgatgcccatcaacacgtcggaatggccgcacaaatatttggtagcggaatggaatacaaaatcgcaacccatatccaacggctgttgcagatacggcgtggcaaaagtgttgtcgataccgaccagcgcaccggctgctttggcttttgcggcaaggactttgatgtctaccaagcgtaaaagtggattggacggcgtttccagccaaaccagtttgaccttgtgcgctttaagcagttcgtccaaattatccggattgcctaaatcggcaaaaacaacgttcaccccccatttttgataaacatcgaccaataaatcataagcgccgccgtaaatatcggcgacggcgacaatggtatcgcccgggcgcaggaaagtgcgccatacggcatcaattcccgccataccgctggaaaacgcaaaacctgccgcaccgtgttccaaatcggcaacggtgtcttctaaaatctgacgggtcgggttgctcaggcgcgaataacggtaaggcacattttcgccaatctcgtgcaacgcaaacatactgttttgataaatcggcggcatcagcgcgcggttgtgttcgtcgcaatcgtagctggaatgaatggctttcgtggcgaatttcatttggtctctgcctatgtagatgtgaataatcgaagattttatcactatctgaaaaatagaaacaatcaatgcagctgctaaaagcgagtgatataatctcgcatttgcagattgacggtatattccccggcggaaacgccataccatgcacacatctcaacaattacatgaatattaaggaaaaacaactcatgaacactattgcagacgtgcaatccagccgagatttgcgcaatctgccgatcaatcaggtcggtatcaaagacctgcgctttccgattaccctgcaaactgcagaaggcatccagtccaccattgcccgtctgaccatgacggtttacctgcctgctgagcagaaggggacgcatatgtcgcgttttgtcgcattgatggagcaacatgccgaagccttggattttgcacaattgcgcaagctgactaccgaaatggtcgcgcttttagattcccgcgccggcaaaatcagcgtttctttcccatttttccgcaagaaaaccgccccggtttccggtattcggtccttactggattatgatgtctgtctcacgggcgaaatcaaagacggggcatacggccacagtatgaaggtcatgattcccgtaacctcgctttgcccgtgttccaaagaaatttcccaatacggcgcgcacaaccagcgttcgcacgttaccgtcagcctgactgccgatgccgaagtcggtatcgaggaagtcatcgattatgtggaggcgcaggcgagctgccaactctacggcctgctcaaacgccccgatgaaaaatacgttaccgaaaaagcctacgaaaacccgaaattcgtggaagatatggtgcgcgatgtcgctacttcgctgattgccgacaaacgcatcaagagtttcgtcgtcgagagcgagaatttcgagtctatccacaaccattcggcttatgcctatatcgcctacccgtaggcgcgtttgcgatgaaccaaatgccgtctgaaaggcgtttgggcgttattggcgaatctgccgccgtatcggaaatcaatttgcaatacaagtaataaaaggatgcacgatgacagtattaagcaaagagcaggttctatccgcatttaaaaaccgtaaatcatgccggcattacgatgcggcacgcaaaatcagtgccgaggattttcagtttattttagaactcgggcgtttgtcgcccagttcggtcggttcggagccttggcagtttattgtggttcaaaaccctgaaatccgacaggcaatcaagccgttttcttggggtatggcggatgctttggataccgccagtcatttggtggtgtttttggcgaagaaaaatgcccgctccgacagcccgtttatgttggaaagcctcaaacggcgcggcgttaccgaaccggatgccgtagcaaaatctttggcaaggtatcaggcgtttcaagctgacgacatcaagattttggacgattctcgcgccttgtttgactggtgttgccgtcagacctatatcgcgttagccaacatgatgacgggtgcggcgatggcaggtatcgattcctgcccggtggaaggtttcaactatgccgagatggagcgcatattgtccgggcagtttggtttgttcgatgcggcagaatggggcgtgtccgtcgccgcgacattcggctaccgcgttcaggaaatcgccacgaaagcgcgtaggcccttggaagaaaccgttatttgggcataaggcaatgccgtctgaaaacgcaaggattttcagacggcattttttaatgcttggcggattcgcatttgaagtgcaactttccctaacagaaaaaggccagtatgcggtagcatacggcctttcctgcaagaaagattgccatgagccacacgcaactgacccaaggcgaacgataccacatccaatacctgtcccgccactgcaccgtcaccgaaatcgccaaacagctgaaccgccacaaaagcaccatcagccgcgaaatcagacggcaccgcacccaagggcagcaatacagcgccgaaaaagcccagcggcaaagccggactatcaaacagcgtaagcgacaaccctataagctcgattcgcagctgattcagcacatcgacccccttatccgccgcaaactcagtcccgaacaagtatgcgcctacctgtgcaaacaccaccagatcacgctccaccacagcaccatttaccgctaccttcgccaagacaaaagcaacggcagcacgttgtggcaacatctcagaatatgcagcaaaccctaccgcaaacgctacggcagcacatggaccagaggcaaagtacccaaccgtgtcggcatagaaaaccgacccgctatcgtcgaccagaaatcccgtatcggcgattgggaagccgacaccattgtcggcaaaggacagaaaagcgcattattgaccttggtcgaacgcgttacccgctacaccatcatctgcaaattggatagcctcaaagccgaagacactgcccgggcagctgttagggcattaaaggcacataaagacagggtgcacaccattaccatggataacggcaaagagttctaccaacacaccaaaataaccaaagcattgaaagcggagacttatttttgtcgcccttaccattcttgggagaaagggctgaatgagaacaccaacggactcatccggcaatacttccccaaacaaaccgatttccgtaacatcagtgatcgggagatacgcagggttcaagatgagttgaaccaccgaccaagaaaaacacttggctacgaaacgccaagtgttttattcttgaatctgttccaaccactaatacactagtgttgcacttgaaatccgaatccaagcttatttaaaacgattcgccgggagcgagataacgccatttgccgggcggcagcctgccgagtttgaccttgcccatgcggatgcgtttcagcccgacgacgcgcagtccgaccagttcgcacatacggcggatttgccgctttttaccctgtttcaacacgaagcgcagttggtcttcgttttgccattctacttgggcgggacgcagtttctcgccgtccaaactcaatccgtgattcagtaaggcaagtcctttttcgtccaatttgccgcgcacgcgcaccaaatattctttttcactgccgctgttttcgccgataagctgcttggcgatacggccgtcctgagtcaataccagcaatccgaccgagtcgatgtccagcctgccggcgggggcgaggccgattttgtgtttcggatcgaaacggatgcggccggtatcgccttcccagtgattttcaggggtaatcagttcggcggcggatttatagcctttttccgcttgtgcgctgacatagccgacgggtttgttcaacaggatggtaatgcgtgccgcctgctgttcgtgggctttcttgttcagttcgatacggtctgccggtgaaactttctgaccgagtacggcggttttgccgttgaccgttacccaaccctgttcgatatagccgtcggcttcgcggcgtgaacaaagccccagttgcgccatgcgtttggagaggcgcacggcatcttctgtatggtcggaggaaattttgggattcatggatactttcgggtaaaggccggcttagactaattgctcgccccagtgcagtttttggcgcagggttttgaaatattggtagtcggtcgggtgcaaaatgcgtaagggatttcggtagcggcggatggtgatgcggtcgaggttttgcacgtcgatatgggtttgaccgtcgaaatggacgcgcgcgtcgccgccttgggtaacgaggatttcgatttcggacgtgtctggaatggcgatggggcggttggtcatggattgtgggcagatggggacgagcgtgaaggcgtgtaatcctgcctgcatgatggggccgccggcggcaagcgaataggcggtcgatccggtgggggtggagacaatcagcccgtccgaacgctgggtatagacgaattcccgattgacgaagacttcaaactcaatcatctgtccggcaccgccacgggagaggacggcatcgttgagggcgatggcgcgttcggcggttttgccttcgcggatgagtgcggcctcaatcaggatgcgctcttcggcaaggtatttcccttctaaaacgggcaatagcttgtccgtcatatattcgcggggaatttgggtcaggaagcccaaatgcccttggttgatgccgataatcggaacggcgcgcagggcgatttcgcgggcgacggagagaaaggtgccgtctccgcctaaaacggcgaccaggtcgcagtattgccccagttcggtcttgttgacgatatggcagccgacggtgtcttgggtatagatgcagccttcctttatgccgacttcgtcgagatagacggtaaagccgtgctgcttcaaaaaggtaatcagcgtgtgtgcggtgtcttggatgtcgggcgtgttggggcgggttacgatgccgatgttgtgaaaagggctgttcatgtcggatgccgtctgaaggttagtctatccaaatgtcgcgttcgagccggtcgaggcgttcgttgaggcgttccacgccgtcgcgcagtctgcttatttcgtcgaggcagtcggcaagggcttcgttgccgatgtttgcggactcggattcgcgggaaaatccgccgatttgttcggcgatgttcctgccgatttgtttgatgccgtgtccgatgtcggcggcacggctgccgatgtctgcctgcgtgccgaaaatccgtgccaattcgtccgatgcgcgggaacgcaggctgccgagcagggacagtaccgcgatgccgaggatgaggtcgccttcgagcccgatgtcgcccgccccgggttcgcctccttggaggattttctgtaccgcgctgttgcggaaggtaatttcggtgtctgcaaagccgtttcccgccgagagcaaaccgtcttccgtgatgcgtcccgccagtttcagcccggcaatgttcagggtcagtgttttgcctgcaaaggcggcaagttccgagcggctgtccgggctttgcagaatcaggcggttgatgatggggaggagggcggacatattttctgatcggggcggagaatgcctgtttgttgctgttgccgcttattttacaggcttaagccgttatcgcaaacggtacggatgattttgcccacgctgtcgtcgggtgcaaaatccggcgcgggcaagccgagtttggcggcttcttccgtatagaattcgcgtcgtgtcgggtggcgcggttcgataatgtttttcagccgcctgccgccggggttaaatgccgtctgaaacaggctttcgacggcgatattacggtggacgatgttgatggggcggttgccgcccgggatgttttgcttttgaacaaggcggccgacgggatggcgttcggcgcaataaagcccgcccagccgcaggatgtcgatgttcggaacgccgctgtcgagcaggtgttgttcggcggcgaggatttggcgggcggactcggtttgcggatcgggtagggcgatttcgtcgcattcgcgcgctgtatcgccgtaaacgctggtactgcttgtgaaaatcaggtgttgcacgttgcacgcccgggcaagttctgcccattgtttgacggtatcggcgtaatgtgtcagcgatgatggcggcaagaggcagaaccaaacgggtttgttggcatggtgccgccaaaagcttgtatctcgggcaaggttcgcgctttgaaacgcgctgtcttgattgaggtcgatggtatcgaggtgtatgggcagattgatatcgtccgaagtcaggctgcgtttgacggcggcaacgcggctgccgtgttggtaaaacttttgtgccagcggcaggccgaggtaacctaggcctgtgatggagatatggggcggggggactgcgcgcattcgctgataccgtcgggtaagtgccgtctgaaggctgattcggacgctgtgggtttacgggttgccgttgccgattttccggtcgtatttcttgcggtgttcgggcaaaagataaggacgaaggaggcttaaggtgcggcggatgccgcgtgctttggagtcttcggtcagcttggtgcggccgcgcagggagctgtcgaagtcgaaccagtatttcgtgaccatccacatattgacggcgagatcgttcatggcggtttggtcggcttggatgatgttcagaccgttgagttgggtgagcaggttgaccaagagcggggagactttggcttgggtgaaggtattgtgttcgcccaacaattcggcactgcgtgcaagcagggtgttcacgtcgctgaataggaagcggtattcccacatcacatcataaataccggccatataattgatggagtcttccacatcagacggcaacacggcttcattcaggtatgccagcagggcttcgctgtaacgtttgaacagttggacgatgatttcgtctttgttgcggaagtggtaatagaggttgcccggactgatgcccaagtgggcggcaatatggttggtgctgatgttgcgctcgccttcctcgttgaaaagcgcaaggctggcgtcgatgatgcgtgtgtaagtattgattttggcggggcgggtcacgggcatactccttggatttacaggctgaacgaagcaggcagccaattaggttcggcgtgcaattctacctgaaaccgagcaaatactgtaaatttgatgtgttgcgccaactgccggacatcgtttgccgaggcgttgtttttgttcactaagaccaaagcctgcctgtcatgtaccgccgcgccgccgatttggaagcctttcagacggcattggtcgatcagccagccggcggcgagtttgaccgaaccgtcgggctgcggatagcgcggcatatcaggatgccgctgcaacaaggtggcggctttttctgcgctgacgacggggtttttaaagaaactgccgacattgccaagcacgttaggattaggaagtttactgttgcggattgcacacactgcatcggaaacatctttcgccgtcgggaccctgcccgcgctcagttcggcaacggcggccgccaaatcgccgtaacccaaagtcggcacaaaatgcgtttttaatgcaaatacgaccgaaacaatcacataacgccctttaccctcctgcttgaacaggctttcgcggtaggcgaagcggcagtcggcattggcaagctcgacaaaggtctccgtatccaaatcaaagcagcgcacgctgtgaatcacgtctttcgcctccacgccgtatgcgccgatgttctgcacgggcgatgcgccgaccgtacccggaatcaggctcaggttttccaaaccgctcaaacccagcgcaacggtgtgcaggacaaaatcgtgccaaatttcgcccgcctgcgcttcaatcagaaccatgccgtctgaacgcgcaatctcgcgtatgcctttgttttccatgtgtacgaccagtccggcgtaatcctgcatcaaaaggatgttgctgccgccgcccagccataaaacagtatcgcggtcgaactccagcagtcggacgatgtcgcgcaactcgtcggcatgttcgagcgcgataaaggcccgggcttgggcgcgaagaccgaaggtgttgtagggggtaaggtcggttcggtatcggatgggttgcatggtttgaactttaactgtatttgaattgaagtgtactgcgttttcagacggccttatgcgatctgaccatctccctactgcacaattccaagcaccacaccaaggcgatggcggcgatggtgagcgaggcaatcaatgccgtccagaagccgtaaatgcccatattgaaacggtaggcgagcagatagcccggcagcaggccgcagccccaaaaggcggcggcgtggatgaacatcggcacctttgtaactttgtagccgcgcaaggcgtaggaggcgatacattgggtgaagtctgccggttggaacaagccggcgaacagtaagacggtggcggcgatgcttaaaaccgccggatcattgttgtacatacttaccagcggcgaacggaataataccaaggaaagcacggtaatcacggcgagcatccatcctaacaccagtgacacgcccgaaatataacgcgcccgcgaaaattcgcgccgcccaagcgaaaagccgatgcgcaccgtccccgccgagccgacgctttgcggaatcatatagagaatccccgacaaactgatgccgacctgctgcgccgccacataatcctcgccgaaaggcgcaatcaaaaacacgataaacgaaaacgcgctggcttccaaaaaataagacagcccgatgggtgcgccgattttccaaatctgtttgaacaccgcccaatccggtttgccgaatttcgccgtcagtccgaatgggcggaagaaattttccttggcgatataaatccacaatgccagcgcgctgaaccaaaacaccgccatcgtcgccagtccgcagcctgcgccgcccaaagcgggcataccgaatttgccgtaaacgaaaatatagttcagcggcacgttcaacacaaacgccgcaaagctgaccaacataatcaggcgcgggcggttcaggctggaagtgtaggcgtgcagcgcgcggtgtaccattgccgccggcatcgccaagctggtgaacaacatatactgcgccatcgtgccttccacataatcgctcaaggtcagccagttgcggaacggcgtaatcgccgcccacatcaagaccatgccgaacacgcccaaaaacagcccgaaccaaatcccctgccgccccgtttcgcccacttcgtcggttttacccgcgccgtaaagctgggcaatcatcgggttcagcgccgccataatgcccataaaggtaatataaaccgtggcaaacgcgctgctgcccaaagccaccgccgccaagtcttccttgcccgcaccgcccgccatcacagtatcgacaaaaccgatgcccacctgcgcgacctgcgccaacagcatgggcagggcaagagtggtcagcaggcggacttctttcaggaagacgggaaaggaaaagcggttgaggtcgagcagcataagtgttcaatcaacaaaaatgccgtctgaagcagaaaacggcagcaggaagtgatgagaaataatggtgcacattatatcgtaaaaaaatgccgtgccgtcagacggcggatacagggtataaaagtatattcagattgtgtgtattttatggtaaagtttggttttaacgacttgacggcattgagccgtcggacaggggctgttcggattctgaatcggaaagaagcaccgccgttttgacagcggcgtgatgcgttgcggcaaagatgccgtctgattgcggatcgggcagtcttttgtgtttacaggataaaatagaaggcagattctcatgcagacatggcagcttccggaacatatcgccgacgtactgcccacgaacgcgcggcagcttgaaagcgcgagggagcagttgttggcactgttccgcgtacacggttatgaactggtacagcctccgctgatggagtacgcacattccctgctgacgcatatcgatgcggggctttccctgaaaaccattttggtaacggacaggctcagcggcaggcagttgggcatacgcgccgacatcacgccgcaggtggcgcgtatcgatgcccatcttttatccgccaaccaagggattaaccggttgtgttatgccggtccggtgttgcacgcgcagcccgacggtctgctgaatatgcgcgaacccttgcaggcaggggcagaaatgtacggttttgctgacatccgtggcgacatcgagctgatagacctgatgctgaaaagcatgaaaattgccgatatgggcaaagtgctgctttcgctggggcatatcggcatatttcgcgccttgtccgatgcggcacatttggatgcggggcagtccgcaacgctgcttgccttgatgcaggataaagataccggggcggtcgaagcgcaggtcaaggcttggaagctggacggcatgtgggcaaaagcattctcgctgttgccgcgcctgtacggcgggcgtgaagtgttgtccgacgcgcgcggacggttgccggatttgtcggcggtcggcggcgcgttgggcgaattgcaggcggtgtgcgacgcattccccgattgtgaaatccatatcgacttgtccgagctgcgtgtcgacaattaccacacgggcttgctgtatgccgcctatgccgccgatttccacgacgcggtcgcgcgcggcgggcgttatgacggattgggcggatatttcggtagggcgcgcccggcaacgggattcagtttcgacttgcgcagctttatcgggcgtttgcccgccatcgaacggcagcccgccgtgttggtcgatgcggaagatgccgaagcggcgcacgaagcggtcgaagccttgcgtgaacaagggcagtgtgtcgtaatcgattacggtatcggacacaatgtttcggaagagcttgcaggccgtctgaaaaagacggacggcgtttggcaggtcgtgaaacgctaaatacccgttcatggcggatgaaaggcaaatcgtggcggggcgcaaagccgcaccggtttggggatttccgcaataatttttaatatcgataggttatatggctatggctaaaaatgttgtagtaatcggcgcacagtggggcgacgagggtaaaggtaaaatcgttgactggctggcggaagaagccggcggcgtggtgcgcttccaaggcggccacaatgcgggccataccttggttgtcggcggcaaaaaaaccattttgcgcctgattccgagcggcatcctgcatgaaagtttggactgcttcatcggttcgggcgttgtcgtctcccccgaagccctgttgggcgaaatcgacgagttgaacgcggcaggcgtgaaaaacgtcgaaggccgtctgaaaatcgcgccgacctgcccgctgatcctgccttaccacatcgcgctcgaccaagcccgcgaagcatcgcgcggcaaaggcaaaatcggcacgaccggccgcggcatcggccctgcctacgaagacaaagtggcacgccgcgccattcgcgccgccgatttgctgcatcctgaaaaactgcgtgaaaaactggatgccgtccttgcctattacaatgtccaactgcaacatctgcacaatgccgagccggttaaagcggaagacgtgatggcggttatcgaaaaagtcgcgccgcgcattgcgccgatgattaccgacgtgtcccgcgtgttgaacgagaaaaacaaaaacggcgaaaaactgctgtttgaaggcgcgcaaggtgcgttgttggacatcgactacggcacttatcccttcgttacctcgtccaactgtctggcgggcgcagcttcggcaggcgcgggcgtaggtcctcaaatgctggattatgttttgggcatcgtcaaagcctataccacgcgcgtcggttcgggcccgttcccgaccgaattgttcgacgaagtaggcgtaggtttggcagaacgcggacacgaattcggttcggtaaccggacgcgcacgccgctgcggctggtttgatgccgccgccctgaaacgctccatccaaatcaacggcatttccggtatgtgtattactaaactcgatgtaatggacggcgttgaaaccatcaatatctgcgtcggctatgaattgcccgacggcggcaaaaccgacatcctgccttgcggttccgatgcggtggaaacctgcaagccgatttacgaaaccatgcccggctggcgcgaatccactttcggcgtgaaggactacggcgcattgcccgaaaacgccaaagcatatttgaaacggattgaagaagtctgcggcgcgccggtcgccatcgtctccaccggccccgaccgagaagaaacgattgtgctgcatcatccgttcgcataaggttttgcagtaaaattgccgtctgaagccctaatccgccgttggtcataaatagtagggtatcaacatttcgggctacaatggtacgtcagccaatgccaagacgtgccagcctgatttgttgatgtgtgtactattgcataggcggttaagccatgcaggagatgaaagtgtatatgtcgcgcaaagcccattagccgcaagcgaggggcggggtgcgcgagagagaggggggcaggtgctaagtcattggttatctccttactatctatctaactacgggtgcattatgcgcctatgcctgttttttgtcaaacactatacagttaaaatgtgtaaatatttagtaaggacatatacccttttctttacatttagctccatcggataccagtgcgttcagagaaaatttgaaaatttctatattttggttgtataatgctttcattttagaaaggtctataatgccaaaatcactctcgctacaagatgttcagttaaggttttccagtaaatttcctgataagacggttttgaagttcactaaaaactacgaaccggtaacaatccaatgccctttgcatgggtcggttgtttacgggaatctacaagctgccatgaaatcctcaacaggatgtcctgaatgtactcgaaatcccgaaaagccctctccaaacgccgttgccattaggttggaggacacagagacaggggaaatctacgagtttgcaagtacactggctgccagtaaatttatcggttgctccaacagcactttagctgtacgtttaagcggacgcactccgtttgaccgattgattaggtatcgttataggttggtaaagtaagttcacaaccactatggcacttacatttactcaagcagtttctaagctaacctctaaatttccacatttgaatcttgtggagttcaatggcgttcgttacccgacggtaatcgtctgtcctatacacgggagggttacttgctctacattcaaaagtatgttggactctaaaagtgggtgtccaaaatgtgcatcttatggtgtcaattcccacaaaattccagaagatacaatagataaattatctaaaaatacagtattggaggatactgtaactggcgaaacacttacattcccctcaagagcatctgctgcaaggtcattgggtataaacccagcagctatcactgaccgtataaaaggtcgggttcacacagagactttacttgcagggaggtataaggttcacatctgcactaaatgacgtatacactttttaacagtgtatacccctcgccactatcaggtgcttctcgaaaaatttgacatttttataaatttgctattaaatccatttgacaatcaattttggagtctcaaatggccaaatctttcaaccaagcagcttctgaacttactgatatattccctaatatctctctaaccggctttgacggtgtgaattacccagtaaccgttaattgtcctatgcacgggaacgttcgttattcgacatttaatgcccttataaagtcaaagtacgggtgtcctgagtgtgctaagatgtcaaaaacccaaacacctccaaatgtagggaagcccctcctcatcctcgacacaacgaccaacgaaacactcacgttcccaagcgttactgccgcaggtgctgctttaggtgtacatttccaacaaatcaatcacaggctcaagggtcgaacgtcgcccgacaaccttatttcaaacaggtacaaagtgcttgggtacgataggtaaggttcacaacaccctaaatcctacgaaccaagctcgacggacgttcaaatcccggttagagttaatttatgtaaagatttagtaaagacgtataccatttttctttacattgtgcttgcgcaggatttcaggtaggtctcaaaaaatttgaaaatttctatattttggttgtgtaatccatttgcacataacctatggagacaaattatgggtaagcgaatgactttcgataccgccaaatcacgctttcaagagaaatttccacatttagaattgttggagttcagtggcatttataaaccttccagtgttagatgtcctacgcacggggttgtccaacttttgtattacgacacagctataaagtcaaagtatgggtgtccggagtgcgggaaacttaaaatgaaggaaaatacgcctccccaaaaccaaaaacctgtctccatcctcgacaccgccacaggcgaaacactcacgttccccagcgtacaagctgccgccaaagccctaaacaccccctacggctctatacgaaccaagctcgacggacgttcaaatcccgacaaccttgtctgtaacaggtataaggttctgctataatcaacctatggaaaatattgaagaatacgcactgctgtctcccgaagccctgctggaacgcctggataccgttttgagtatcagaatcggcggcaagggttgggaatccagttatgaccgccaactttgcacagacgctggtcgaaatacaggacagtctgtacagggttgtgtcaaccgtccaatacggggatgacaacctcaagcggttgacagcggacaaacggaagcagtatgagttgaacttcaagatttccgagggttctacgcgtgtagagtccgactttaaagagactttggttcggttcggtagagatatgcttcaagatatgccccctaaaatccgttcggcaacgctggtagcgttgacgaccctgcttgtcggaggggcgttgggttacggttatttggaatacctgaagcaggttgcttcggaagggtatcagaccgagcgtctgtataatgccgtcgaccgtcttgcagaatcccaagaacggataacgtccgccatcctgaagggtgctagaggtgccgatttcgtgcaaatcggcagacgttcctacagtagggaggatatatcggaggcaaatagacgtgcagagcgtgtcccgtatggcgcagagttggtttcagacggcaattttaccgctgttttatctgatataggggattaacaaaaatcaggacaaggcgacgaagccgcagacagtataaatagtacggaaccgattcacttggtgcttcagcaccttagagaatcgttttctttgagctaaggcgaggcaacgccgtactggtttttgttaatccactatattttctgtccggatacggtttatcagggtatatcaatgcggcgtatccggtgcggaaatggatacggttggtgtcggtatggaaacctgatgttttcagacagcatatacaaaaaaccgtactgcttgcgcgtacggtttttgccgtttcaaatcggtttaaagcgatttgaggcgggcgatacggttgtccagcgaagggtgggtgctgagcagggagtcgcgcgtatctccggcgatgcccattgcgttcatttcttcgggcaaatcgaccgggttgcctttgagcctttgcagggcggaaatcattttcggcgcgccgaccagttttgccgcgcccgcatcggcgcggtattcgcgttgtcggctgaaccacatgacaattaagctggcaaggaagccgaacaggatttggaataccatgctgaccaggaaataagttccctgggactggctgccgtcgttgtttcgggcaatcaggttggcaataatgcgcgacaggaacacgacaaaggtattgaccacgccttgaatcagcgtcagcgtaaccatatcgccgttgccgacgtgtgccatttcgtgcgccaatacggcttccacttcgtcacgcgtcatatggtcgagcaaaccggtgctgacggcgatcagggagctgtttctcgatgcgcccgtggcaaaggcattgggttcgggggagtggtagatggcgacttcgggcgttttcaggttccattgccgcgcttgggcttcgacagtgttcaaaagccaggcttcttcttcggtgcgcggcgtgtcgataacttccgcgccgaccgattgtttggcgataaatttggacatcagcagcgaaataatcgaaccagtgaagccgacgacggcggaatacgccaacaggctgcccgtgccgccccggctgttgatgcccaaaaccgccaaaacaatgttgattacgaccaaaacagcgatattggtagccaaaaacagaaaaattcgtttcacggatgttcctttttggtagggtgtgatgttttgaaattttgggggattgtcccaaaaagttgccggcttgtgaatatcagactcggcaaaggtatgcaaaacatttgcttgcaaatggcagtttgtgcagttggtttttgaactattgtgccaagccgtgtagaatcgtaaaccatctgtttgattccaataaacacatttcaaaggatcacttcatgaaagcattacttttaggcgcgccgggcgcgggcaaaggcactcaggcgcaattcatcaccgcagcgttcggcattccgcaaatctctaccggcgacatgctccgtgccgcgattaaggcaggcacgcccttgggtttggaagcgaaaaaaatcattgacgaaggcggcttggtgcgcgacgacatcattatcggcatggtcaaagaacgcatcgcgcaagacgactgcaaaaacggtttcttgtttgacggtttcccgcgcacattggcacaagccgaagcgatggttgaagcaggcgtggatttggatgcagtcgttgaaatcgatgtgcctgacagcgtgattgtcgaccgcatgagcggccgccgcgtgcatttggcttccggccgtacttaccacgttacctacaacccgcccaaagttgaaggcaaagacgacgtaaccggcgaagatttgattcagcgcgacgacgacaaagaagaaaccgtgaaaaaacgccttgccgtttaccacgagcaaaccgaagttttggtcgatttttacagcaaactggaaggcgaacacgcgcctaaatacatcaaagttgacggcacccaagcagtagaagccgtgaaagccgaagtattgggcgcattgggcaaataaatcgaaaaggtcgtacccacgggcaggcttcgcactctgaaaacagaaaatcaggttttcagacgacctgtttttgataaacagcgtgttgcaaccgaaaaataatcatttggcgtcattcccgcgcaggcgggaatccatttctgaatttgggcaatcgctgtttaaatctgatgaactgagttttatcaatggattcccgcctgcgcgggaatgacggctgatgtaccggttcaaatttatccgaaacagtttgtcggaggcttgagtccgcgtaggtcggacatcaatgcccgacctacggtttgaatttacgttgttatagtggattaacaaaaatcaggacaaggcgacgaagccgcaggcagtacagatagtacggaaccgattcactttgtgcttcagcaccttagagaagcgttctctttgaactaaggcgagacaacgccgtaccggtttaaagttaatccactatactgcgaaaaagacgataaaggtcgtctgaaaacccgaaacgaaaacaccatgaatcctttaatctccgacttccaaactccgcaacaacgcacccccgttatcgtcgcccttgatttttccaacgaaaaagacacgctcggattcgtccgcaaccttgacccgacattgtgtcaaatcaaaatcggcaaagagctgtttaccgcgacgggacgcaatttggcagaaagcttaatcaatcaaggtttcaaacttttcctcgatttgaaataccacgatattccccacaccgtcgcgcaagcctgcaaagtcgctgccgatatgggcgtttggatggtcgatatgcacgcatcgggcggccgccgtatgatggaagccgcagcagaagccgttgccggatacggcacgaagccgctcttaatcggcgtaaccgtgttgaccagcatggaacaaagtgatttggcggaaatcggtttgaacaccgcccctgaagaacaagtcatccgcttggcaaaactggcgcaaagttcgggcttggacggcgtggtctgttccgcccaagaagccgcgccgctgcgccgcgaattgggacaggattttgtcttggtcacgcccggcatccgcttggacgttgccggcaataatgatgaccagcgccgcatcatgacaccggccgaagccttggctgccggttcgacttatttggtaatgggtcgtcctgtaacccaagctgccgatccggtagccgtattgcgcgaagtgaaccgcgtggcaaaccttgaagcaaactgattttcagacggccttacaggctgaggccgtctgaaaaaatacaacggaggcaatatgtccgccaagttccaacaagaaaccctcaaatcccgtttcgcgcaagccaaagtcctggttgtcggcgacgtgatgctcgaccgctattggttcggcgatgtgtcccgtatttcgcccgaagcccccgtgccggtggcgaaaatcggacgaatcgaccaacgcgcgggcggagcggcaaatgtcgcgcgcaacatcgcttcgttgggcggcagggcagggctgttgtccgtaaccggcaacgacgaagccgccgacgcgctcgatgcgctgatggtgcaggacggcgtcgcctcctatctgatgcgcgacaaacaaatcgccaccaccgtcaaactgcgcgtcgtcgcccgcaaccagcagcttatccgtcttgattttgaagaacatcccaactgcgaagtgttggaacaaatcaagcagaaataccgcgaaatcttgcccgaatacgacgcaatcattttttcagactacggcaaaggcggcctgtcgcatatctccgatatgatcgattgggcgaaacacgccggcaaaaccgtcttaatcgaccccaaaggcgacgattacgaaaaatatgtcggtgcaactctgattacgcctaaccgcgccgaattgaaagaagtggtcggcagttggaaaaacgaaagcgagctgaccgaaaaagcgcaaaacctgcgccgccacctcgacctgaccgccgttttactgacccgaagcgaagaaggcatgaccttgttcagcgaaggcgaaccgatttaccagcccacccgcgcccaagaagtttacgacgtatccggtgcgggcgacaccgtcattgccggaatgggcttgggtttggcggcaggctgcaccatgcccgaagccatgtaccttgccaatactgcggccggggttgtcgtggcgaaactcggtacggcggtttgctcgtttgccgaattgatcaaggcattgtcagggcaatcaacaatgtagttttcatattgataagataaacagaacgatataagtatgactatttcgacaatggcacagacacacgatactcgattacaaaaaactttgctctttcccagtcaacaaggttggaaatctaaaacttttcttaaacctgattcacatattagattagcaaccgtattcagcgggattggtgcggttgaacaggcattccaccgattaaatttaaaccataccattgttttttcaggagatattgatccatacgttaaaaaaagttatcttggaaactataaattaaatgaagatttttggcataacgacattactcaatttgatgcgagaaagtttagaaatcaagttgatattttagttggaggcagtccttgccaagcattttccatggttggcaaacgtgcaggattagaagatacacgaggaacattattctatgaatttgctcgcgttgtggatgaagtccaaccaaagatatttatttatgaaaatgtaaagggcttgcttaatcatgataatggaaaaacttggaaagttgtaaaaagtgttttttattcacttggttatgacttatatttccaaataatgaatagtaaggattatgggattcctcaacatcgtgagcgtatttttgttgttggctttcatacccctcctataaatggttttcagtttcctgaaaagattgaattagaacatactatgcaagattttttggaggactatactgatagcaaatattttttacgtgaaaagggtgcgaaatttgttaccagttctaaaaatagacaaaaacgttatacacagattaatggagaaattgccttatgccaaaaagcaaatcaacaatttaattggcatggtgattttatttttcaggcagcccgcgaatctgaatttgatgactttatttttgatgtaaataacgttgaggaaaaatattatctttctgaaaaaatcaaaaattatgttttggcaggaggaacaaaaaattttaaaaccagtacggaaactgatttgcctgtagctcgcccattattgcaaactatgcataaaatgcatcgtgccggggttgataattatgttactcataatcgtggacgtattcgtaaattaacacctagggaatgtttgcggctaatgggttttagagatgattttaaaattttagttagtgatactcaaatgtatcgccaagcgggaaacagtattgttgttgatgtattaatcgctatattaaaacaaatggatattacgctttatggagagtaaaatgccggattttcaaagaattactattgaaaacatagagtattttattgtcgatagtattcaaaatttacgtgcggaagatagttttattcacaggaataacaagttatctgtttttggtggtaatggggaagcacgcaaatatgtaggtagttatattgatgatagtggtcgaaaactaagtacattttttgagtatgaaaattgggggattactgagacaaaaaatggaaggagggtagaatatcctttcattcagaaaaattgttttttttataagaaaaatttacagcgttatttggttgatgcaaaagttgaatatcacaaacaagaacagaaatatcatcatgatatttcaaggttttatgatgattacgttttaagtattaataatctgcctacagaaaatattttcttttcaatccatgatgtatcagaccatttggaaaattctaaaggttaccgtaggggttatatccgttcggaggatgatatatggtcaatttggcgtaagattgtattgcccaaaattagttatttatcaattcttaaactattgcctgtcaaagatatagaagattcagaaccattattttatttccgaatatttttggattatcaatttcgctctatcgtgcacccgcaactcttatcaagagaaaaattagaaataccggcttcagaatttaatcaattcgtagagcaagaaatcattaaacagaaaagtagaaaagggcagcagaaatatcgcaaggatgttataaatcatatgtcgcaatgtccatttacattaattacagatgagattttgttaagggctagtcatattaaaccttatatggtttgtattactgagaaaaatgagaaagaggcattagattatttaaatgggttagctttaacgccgacttatgattggttgttcgatcaaggttatattactttcttggatgatggtcgtttgatttgcggtactcgactaagccgttacacatgggaaaaacttaatatcaatccaaatgcaaaaaattaagatgagaatatatcccgaaggaagagaaaaatatttggaatatcatcgcaaatttgtgtttcaggacaatatcgatgatttcttgtaactaagtttattaattttactcaaaacaaaggaaaccgaatatgaccatcatcgtaacaggcgcggccggctttatcggcagcaacatcgtcaaagcacttaatcaacgcggtattactgacattgttgccgtcgataatttgagcaaaggcgaaaaattcaaaaaccttgccgagtgcgaaatcgcccattatctcgacaaacacgaattcatccgccaagtgagggaacacattttaccttatcaaaacatcgaagccgttttccatcaaggcgcgtgttccgatacgatgaaccacgacggtttgtatatgatggacaacaactaccagtacacgctggatttgctggactggtgtcaggacgaacgcatccccttcctttatgcctccagtgcggcggtttacggcaaaggagaaatcttccgcgaagagcgcgaactcgaaaaaccgctcaacgtgtacggctactccaaattcctgttcgaccaagtattgcgtcgccgcatgaaagaaggtctcaccgcccaagtcgtcggcttccgctacttcaatgtttacggacaacacgaacaacacaaaggccgcatggcatccgtcgccttccaccacttccaccaataccgcgaacacggttacgtcaacctgttcggcagtaacgacggctacggcaacggcgaacaaacccgcgacttcgtcagcgtcgaagacgttgccaaagtcaacctctacttcttcgaccatcccgaactttccggcatctacaacctcggtaccggccgcagccaacagttcaacgaactcgccgccgccaccgtcaacgcatgccgcgccgccgaaggcaaacctgaaatgagcttgaaagagttggtagaagaagaacttatccgctacattcccttccccgacgcgctcaaaggcaaataccaaagcttcacccaagccgacatcaccaaattgcgcgaagccggatataaggaagaatttttcgatgtcaaatcaggcgtcgaccgctacgtcaaatggatgctggaaaatttggcttaatttgaatgcccgtaaaaaaatcgtctgaaaatatcaggcgattttgatttgtttaacttttatatggatttcgatgatgaccgaaatgcaacaacgcgcccaactgcaccgccaaatttggaaaattgccgacgaagtacgcggcgcggtggatggctgggactttaaacaatacgttctcggcacacttttctaccgctttatcagcgaaaacttcaccgactatatgcaggcaggcgacagcagtattgattacgccgctatgccggacagcatcatcacgcccgaaatcaaagacgatgccgtcaaagttaaaggctatttcatctaccccggccagcttttttgcaatattgccgccgaagcccatcaaaacgaagagctcaacaccaagctgaaagaaatttttaccgcgattgaaagctccgcctccggctatccgtccgaacaggacatcaaaggcctgtttgacgacttcgacaccaccagcagccggctcggcagcactgttgccgacaagaacaaacgccttgccgccgtcctcaaaggcgtggcggaactcgatttcggcaattttgaaaaccaccacatcgaccttttcggcgatgcctacgaatacctgatttccaactacgctgccaacgcaggcaaatccggcggcgaatttttcaccccgcaaagcgtatccaagctgattgcgcggctggcggtgcacggacaggagaaagtcaacaaaatctacgacccagcttgcggctcgggcagtctgctcttgcaggcgaaaaaacagtttgacgagcacatcatcgaagaaggcttcttcgggcaggaaatcaaccacaccacctacaacctcgcccgcatgaacatgttcctgcacaacgtcaattacaaccaattccacatcgaattgggcgacacactgaccaacccaaagctcaaagacagcaaaccctttgatgccatcgtttccaatccgccttattccatcaactggataggcagcgacgaccccaccttaatcaacgacgaccgctttgcccccgcaggcgtacttgccccgaaatccaaagccgattttgccttcatcctgcacgcactgaactacctttccggcagaggccgcgccgccatcgtctcattccccggcattttctatcgcggcggcgcagaacagaaaatccgccaatatctggtggagggcaactacgtggaaaccgtgattgcccttgcgcccaatctcttttacggcaccggcatcgccgtcaatatcctggttttgtccaaacacaaagacaataccgacatccaattcatcgacgcaagcggcttctttaaaaaagaaaccaacaacaacgtcttaatcgaagaacacattgctgaaatcgtcaaactcttcgccgataaagccgatgtgccgcatatcgcccaaaacgctgcccagcaaaccgtcaaagacaacggctacaacctcgccgtcagcagctatgtcgaagccgaagacacacgcgaaattatcgacatcaaacagctcaacgccgaaatcggcgaaaccgtcgccaaaatcgaacggctgcggcgtgaaattgacgaagtgattgcagagattgaagcatgagcatcatcctatacaccgccaacgacggcactgcccaatttgccttgcaggaatttggcggacagctttggctgacgcaggcggacatggcagaactgtaccaaaccaccaaacaaaatatcagcaaacacattaaaaccattcttgcagagcaagaattggaagagaaggcaactgtcaacttccagttgacagttcaaaatgaaaacgggcgcaaggtaaaccgcaaaatcgcccattattccctgcccatgattattgccgtcggctaccgcgtccgttccgcgcggggcatccaattccgccaatgggcaaccgaacggctggacgaatatctgaccaaaggctttgccatagacgacgaacgcctgaaaggcacaggcggcggcgactattggaaagaactgctcaaccgcattcgcgacatccgcagcagcgaaaaagccctataccggcaagtgcttgatttatatgccaccagccaagactacaaccccaaaagcagcgaaagccaaaccttttttgccgccgttcaaaacaaactgcactatgccgccagccggcaaaccgcagctgagctgatatacagccgtgccgacagcagcaaagactttatggggctgaccacctttcaaggcgcaatccccacgctgaatgaagccaaaatcgccaaaaactatctgaccgaagacgaactgttccgcctgaaccgtctggtttccgccttcttcgacctagcggaaatcaaagcgcaggagcaaagccccatgtatatgcgcgactggatagccgaattggacaaattttccgggctgtacggacaaggcacattacagggtgcaggcagcatcagccgcaaacaggcagagcagaaagccgaacgcgaataccgcgcctatgaagcgcgcatcctgtcgccggtggagcaagcctatctggaaagcgttaaagcgttggaaaaaacagccgtgcaacagatcaaacagaaaaaagaccgcacaaaataactaccattcaggctacctgaaaaagcagcctgcacaccattgcaggcagcctgaaagcaggacggacttcagcccgcagaaataacggcaaacggacagagtgagccgaagcaccccgcaactgccccacatcccgccgcaacgggaaagaaacggaaaacaaccatggatatgcaaaacaaagcgaaaaaattgattgagatgattcagacggcaccggtggagtggaagccgttgggggaagtggcgaaagtattaagaggaaaacgtttgacaaagaaagagctaattgaaggtgggaaatatccggtttttcatggcggattgattcctcttggttggtttgaccagtttaatcgtagagctaatcaaacgatgattattaatacgggaagtattggtgaagttatatggagtggcgtagatttctggtcatctgatggtacttttgtgattcaaacaccaaactatcttgatgataagtttatattctactttttaaaaacaagagaaggatatataaaatcccaaaagagagttggtggagttcctactattgatagattagtagttgaaaatatttcgatccccatcccacccctggaaacccaacaaaaaattgtaaaaatacttgacaaattcacagagctgtaagctacgctggaagctacgctggaagcggaattaaccctgcgcaaacgccaataccggtattaccgcgactttcttttagattttaacaatcaaatcgggggggatagctgatggctataaaggccgtctgaaagatgtggtttggaagacgttgggggaggtatttaatatttttgctggaggcgacgtaccaaaagacgctttctctgaagtggaaacggaagaattttgtatccccattttatctaatggtataggaagtaaggcactatatggctggactaatgttgctaaaatcaatcaacctagcttaactatatcagctagaggaactataggttgggctagctttcagaataaaccttttttcccaatagtacgcctgttagtgttaacaccaaaaattgaattaaacctaaaatatgcctactactttatgaaaagtattgaatcaaattataaagttcctgaaagcggtattccacagctaacgaaaccaatgataaaagatatttcaatccccatccctccactccccgaacaggaaaaaatcgtcgccatcctcgacaaattcgacaccctgacccactccatcagcgagggcctaccgtacgaaattgccctgcgccggaaacaatacgaatattaccgcgggcagttgttgagcttcccaaaggctgcctgaaaagtcatagctggtctttaaatcatgccgtctgaaaaatattgataaggaaatatcatgggaaaaagtttaaccgaaattgctgaggaactaaaaggaaacgataaaaaagtccagctaatctatgcttttaacggaacagggaaaacacgtttgtccagagagtttaagaatttaattgctccaaccagttcagaagagccagacggagagccaacaagaagaaaatttctctactataatgcatttactgaggatttattcttttgggacaatgatttgttagcgaacgaagctccaagattaaaaattcaaaagaatagttttaccgactggttgcttagggataatggactggatggagctgttattaaaaactttcaatattatacagatgataagttgactcctgattttaatgatgatttttcagaaattgcattttattttgctcgtggtaatgatgagcagattgaaaatatcaaaatttccaaaggtgaagaaagtaattttatttggagcattttctatgtattaatcagacaagtcatcgctgaattgaatattccagaagatagcgaagaaggacgttccacagatcagtttgacgatttggaatatatttttattgatgaccctgtcagctctttggatgaaaatcatctgattcagcaagcggttgatttggctgatttgataaagcttagcaaaccgaggttaaagtttatcattactacacataatgttttattttacaacgttctatacaatgaactaaaaaaattagaaaaggaaaagaaaagttatcttctgttaaaaaatgaagatggtagttttgatattcttgaaaaacaaggtgattccaataaaagtttttcatatcaccttcacttaaaaggagttattgaaaaagctatcgagaatcagcaggtagaacggtttcattttatgttgctgagaaacctgtatgaaaaaacagctaattttttaggctataagcaaaggtctgatattttgcccgaagacagcagacgaaactattttcaacgtattattaactttacaagtcattctacattatctaatgaggcatttgccgagccaacaccacaagaacaagaaactgtcaaattgcttttgcaacacttgctggataactataatttttttcaagatgatgaacaaagagataagccatgaacctcgaaaccaaacccatcgctgaaacgccgaatttcatcgtgctcgaccaatatgaaaaaatcgaacagtcgggcagctaccaatcggaaaaccggttggaagcggagttaatcgccgatttgcagaatcagggttacgaataccgcaaggatttgaacagccaaagcaggctgctggaaaacctgcgcgcgcagttgcagcggctgaacgatgtggcgttttcagacggcgaatgggcgcggtttttgacggaatatctggacaggccgtctgaaaacattaccgataaaacccgcaaaatccacgacgaccatatttacgatttcgcttttgatgacggtccttggattcggatttcaagtgcaacactagtgtattagtggttggaacagattcaagaataaaacacttggcgtttcgtagccaagtgtttttcttggtcggtggttcaactcatcttgaaccctgcgtatctcccgatcactgatgttacggaaatcggtttgtttggggaagtattgccggatgagtccgttggtgttctcattcagccctttctcccaagaatggtaagggcgacaaaaataagtctccgctttcaatgctttggttattttggtgtgttggtagaactctttgccgttatccatggtaatggtgtgcaccctgtctttatgtgcctttaatgccctaacagctgcccgggcagtgtcttcggctttgaggctatccaatttgcagatgatggtgtagcgggtaacgcgttcgaccaaggtcaataatgcgcttttctgtcctttgccgacaatggtgtcggcttcccaatcgccgatacgggatttctggtcgacgatagcgggtcggttttctatgccgacacggttgggtactttgcctctggtccatgtgctgccgtagcgtttgcggtagggtttgctgcatattctgagatgttgccacaacgtgctgccgttgcttttgtcttggcgaaggtagcggtaaatggtgctgtggtggagcgtgatctggtggtgtttgcacaggtaggcgcatacttgttcgggactgagtttgcggcggataagggtgtcgatgtgctgaatcagctgcgaatcgagcttatagggttgtcgcttacgctgtttgatagtccggctttgccgctgggctttttcggcgctgtattgctgcccttgggtgcggtgccgtctgatttcgcggctgatggtgcttttgtggcggttcagctgtttggcgatttcggtgacggtgcagtggcgggacaggtattggatgtggtatcgttcgccttgggtcagttgcgtgtagctcatggcaatctttcttgcaggaaaggtcgtatgctaccgcatactggcctttttctgttagggaaagttgcacttcaaatgcgaatccgccgtcgtctgaaaaacatttatctgctggacaagaaaaaccttgcccgcaaccatgtgcaggttatcaaccagtttgagcagacgggcacgcatgcaaaccgctatgacgttaccgtgttggtaaacggcctgccgctggtgcagattgaattgaaaaagcgcggtgtggcggtgcgcgaggcattcaatcaggtgcaccgttacagcaaagagagcttcaacagcgaaaattcgctgttcaaattcctgcaaatcttcgtgatttccaacggcacggacacgcgctatttcgccaacaccaccaagcgcgacaaaaacagcttcgatttcacgatgaattgggcgcggtcggacaatcatccgattaaggatttgaaagactttaccgccacgttcctgcagaaaagcgtattgctgggcgttttgctgcattacagcgtgttcgatgcgaatgatacgctgctgattatgcggccgtatcagattgccgccgccgaacgcattttgtggaaaatcaacagctcggcgcaggcgaagaattggagcaaaccggaaagcggcggctatgtctggcacaccacgggcagcggcaaaacgctgaccagctttaaggcggcgcgtctggcgacggaatcggcatttatcgacaaggttttcttcgtggtggacaggaaggatttggactatcagacgatgaaggaataccaacgtttttcgcccgacagcgtgaacggttcggaaagcacggcaggcttgaaacgcaatttggaaaaagacgacaacaaaatcatcgttaccaccatccaaaagctgaacaacctgatgaagggcgaagataatctgccggtttaccatcagcgagttgtctttattttcgacgaatgccaccgctcgcaattcggcgaagcgcaaaaaaacctgaaaaagaaatttaaaaaattctgccagttcggctttaccggcacgccgatttttcccgaaaacgctttgggcgcggaaaccacggcgggcgtgttcgggcgggagctgcattcttatgtgattaccgatgccatccgcgatgaaaaagtattgaaattcaaagtggattacaacgacgtgcgcccgcagttcaaagccgtggaagcggaacaggacgagaagaaactgagtgccgccgaaaaccacaaagccctgctgcaccctgaacgcatccgcgaaatcacgcaatatatcctgaatcagttcaggcagaaaacgcaccggctgaatgcgggtggcaaaggctttaacgcgatgtttgccgtcagcagcgtggatgcggcgaagtgctattacgaagcgttcaaaacacaacaggcaggcagcttgcacccgctgaaagtggccaccattttttcctttgcggccaacgaagagcaaaacgccgtcggtgaaattgtcgatgagacttttgaaccggaagcgatggacagcagcgcaaaagaatttttgcaggctgccatcaacgattacaacgcctgtttcaaaaccaatttcggcacggacagcaaagcctttcaaaactactaccgagatttggcaaaacgggtgaaaaatcaggaaatagatttgctgattgtggtcggcatgtttttgacgggttttgacgcgccgacgctgaacacgttgttcgtcgataaaaacctgcgctatcacggcctgatgcaggcgttttcgcgcaccaaccgcatttacgatgccaccaaaaccttcggcaatattgtctgcttccgcgatttggagcaggcaaccattgatgcgattaccttgtttggcgacaaaaacaccaaaaacgtggtgctggaaaaaagttacgaagaatacatgaacggctataccgacagccagaccggcgaagcacggcgcggttatctggatgtggcaaaagaattgcgcgagcgtttccccgatcccgacaaaatcgaaacggaaaaagacaaaaaagattttgccaaactcttcggcgaatacctgcgggcggaaaacgtattgcagaactacgatgaatttgccgcgctgcgcgagttgcagagtgtggacgcggcggacgaagatgcgatgaaggcgtttcaagaaaaatactacctgagcgatgaagacgtgcaggaaatgcggcaagtgccgatgccgtctgaaagggcggtgcaggactaccgttccgcctacaatgacatccgcgactggctgcgccgccaaaaagcaggcgaacagaaagagcaatcaaaaatcgactgggacgatgtggtttttgaggtggatttgctcaaatcacaggaaatcaatctggattacatcctgcaactggttttcgaacaccacaaaaaaatcaaaggcaaagcggagctggtggaagaaatccgccgcatcatccgcgccagcatcggccaccgcgccaaagagggtctgattgtggatttcatcaacgatacggatttggacaaagtacccgacgttcccgccatactggaaaccttctacacctacgcgcaagaggtgatgcggcacgaagcggcaggattgattgccgccgaaggcctgaacgaaaccgccgccaaacgctatttaatcagctcgctcaaacgcggctatgccagcgaaaacggcacggaactgaccgaaaccctgccgaaaatgagtccgctcaacccgcaatatctgacgaagaaacaaagtgtttttcaaaagattgcggcgtttgtggagaagtttgccggaatagggaccgatatttgacaaaatgccgtctgaaatttcagacggcatttttgattttatgcggaggcggtttttattttgaccttgcttttcttaaacttcaacacggcttcttcttttgccgcatcccagtctatccgtacgaagccgccgtcggatagtttgccgaacaggagttcgtcggcgagcggtttgcggattttttcctgaatcaggcggtgcatcgggcgcgcgcccatttgcgggtcaaaacctttttccgccagatatttgtgcaatgccgacgtgaattcggcttcgacttttttgtcgaggagccggtgttcgagctggagcaggaatttgtccacgactttggtgatgacgggttcggataagggcgcaaacgggataatcgcatccaagcggttgcggaactcgggcgtgaagagcttgttgatagcctgcatttcgtcgccgcgctcgcgtttggcggtaaagccgaggctgggtcggctgagactctccgcacctgcgttagtggtcataattaggatgacgttgcggaaatcggcactcttgccgttgttgtcggtcagtttgcctgcgtccatgacttgcaggaggacgttgaaaatgtcggggtgggctttttcgatttcgtccaagagcaatacgcaatgcggctgtttgttgatggcttcggtcaaaaggccgccttgttcaaagccgacgtagcccggtggtgcgccgatgaggcgcgatacggcgtggcgttccatatattcggacatatcaaagcgttgcagcggtacgcccatcgagtaggcaagctgtttggcgacttcggttttgccgacgccagtcggaccggagaagaggaaactgcctatcggtttgtcgggcagggcaaggccggaacgcgacattttgacggcagcaaccaacgcgtcgatggcgttttcctgaccgtaaaccatgtttttcaaatcgcggccgaggaattgcagcacctgtttgtcgtcgtgcgacacggttttttctggaatccgcgcgactttggcgatgacggtttcgatttgcgctttgccgatgacttttttctgtttggatttgggcagaatccgttgctccgcgcctgcttcgtccatcacgtcgatggctttgtcgggcaggaaacgctcgttgatgtagcgtgcggagagttcggcggcggcttcgagtgcgccttgagtgtagcggacttggtggaaggcttcaaacatcggtttcaagccgcgcaggatttgaacggtttcggaaacggtgggttcgaccacgtcgattttttggaagcggcggcttaaggcatggtctttgtcgaaaatggtgcggtattcgtcgtaggtggtcgcgccgatgcagcgcagcgaaccttttgccagcgcgggtttgagcaggttggacgcgtccatggtgccgccgctggtgctgcccgcgccgatgatggtgtggatttcgtcgataaacaaaatggcgtgcgggattttttcgagctgtttcaagacggatttgacccgcgcttcaaagtcgccgcggtatttcgtgcccgccaacagcgagcccatatccagcgcgtacacttcggcatctttaagcgcgtctggaatgccgccgttgacgatttgatgtgccaaaccttccgccagcgcggttttgcccacgcccgcttcgccgaccaaaagcggattgtttttgcggcggcggcataggatttgcaccagccgttccatttcgtgtttgcgaccaatcaaagggtcgatacggccggctttgacttcggcgttgaggttgacggtgtacgccgataaagggtttttgcccggtttggtgcggtttccattatcgtcgtccatgccgtctgaagaatagttgccatcgtcttcatcttcatcttcatcttcatcttcatcgggagagccgtgggcaatacagcgcaaaacttcaaaacgcgtaaccgattgcagcttgaggaaatagacggtgtggctgtcggtttcgctcatcagcgcgaccaaaacgtccaacggttcgactgcggcttttccggcagactgggtatgcaccatcgcccgttgcatcacgcgttggaagccgagcgtgggccgggtttcgaccgtgtctaaaaggtgttcgggaatcaggggggtgttttcggcaacgctggcggcgagctgttcggacaccactttcaaatccgcgccgcagagcttgaggacgttgtggacggaggcatcttcttcgatgagtaccaaaagcagatgctcgaggctgataaattcataatgagccttacgcgcctcgcggtaaagctgctgcaaaatctgttccaattcgggtgcaagcatattaaatctcctcgacaatacattgcagcggatgcccttcggcttttgcccgctgcatgacttgttgttgtttggtttgggcaatatcgcgcgtgtaagtgccgcacaggcctttgccttcgtgatgaaccaagagcattaccgctaccgcctgttcttgtccgagcataaagatttcggtcaggatttcgacgacaaattccatcgtggtgtaatcgtcgttcaataggaaaacgccgtaacgtttcggcggcagggtgttcagacggtgcaagagcgtgtcggattggtgttgcgcggtcatagtgtgtcccatttgaaagccgcgttcagacggcatttttgttgtattttcggtacttttgcctattttcccacttttttgaaaacatagcttgacgttttgtcttaacaaatgtaaaaagacggttaagcaggattgggcatccgccgagtatatcaagctggaaggaacgccagacggctcggtttgccgtatgccttgttttgctgattttgttaatttttgagtataggaagtttctaatggcaaccggtatcgtaaaatggtttaacgacgctaaaggttttggtttcatcacgcctgatgaaggcggcgaagatttgttcgctcacttctcagcaatcaatatggaaggtttcaaaaccctgaaagaaggccaacgcgtctctttcgacgtaaccaccggccctaaaggcaaacaggccgccaacattcaggctgcttaattcctgatgtacggtcaaatgtatatttgaaaacggcgggacaggcaatgtcccgccgtttttgtctgccgttttgccggcggcggaaaaaccccaatccccgcacgccttatcctgaacttgtgtgtaccctgttgtggacaagtggcttagtattttgacggataagggaaaatcagtgctgatgaaaaaatgtgcaatgttgtcggcaaaaggcggtgcggcataaaacggcaaacgggtaggcacggggcaaaacgtgctgccttcgtcttcagacggcatcggcagggcgttcagcttccggcaaccgtcatccccgcaatcagaatcgagccgattttgttggacgaacgccgcaaagcgtcatccgccacgccgacaatgtcgcggtacatatcctgcaagcgtccggctacggtaatctcgtggacggggtaggcaatcacgccgttttccacccaaaaacccgccgcgccgcgcgagtagtcaccggtaatggtgttcgcgccctgtcccatcagttcggttaccaacaatcccgtccccatttctttcagcaggtcggattgcgtttcgtgcgtatggttcaaatacaggttgtgcgcgccgccggcgttgcccgtggtctgcataccgagtttgcgcgcgctgtaactgctgaggaaatagccttcgacaatgccgttttgaatcacgaagcgcggtgcggtggcaacgccttccgcatcaaaatagctgctgcggaaagagcgggggatgtgcggttcttcgcgcaggttgaggaaatcgggcaggacttttttgccgatgctgtcgatcaggaaactgctttggcggtagagcgcgccgccggagagtgcgccgacgaggtgtccgataagaccgcccgaaacggtggtatcgaagaggacggggtagctgcctgtcgggatgctgcggctgccgagtcggcgcaaagtgcggcgggcggcggtttgaccgatggtttcggggctgtccatatccggatggcggcaggcggaatcgtaccagtagtcgcgctgcatgccgttttcgtcggcggcaacgacgctgcaggaaatgctgtggtgcgtgccttgccggtgtgcggcaaaaccgtgggtgttgccgtaaacgtattggtaatggccggtttgcaccgccgcgccttcggagttttcgatgcgctcatcctcgttcagggcggcttgttcgcattgttttgccaagccgacggcggcttccgtatccaaatcccattcgtggtaaaggtcggggtcgccgatgtgttttgccatcagacaggcatcggcaagtccggcgcaaccgtcttcggcggtgtggcgggcgatgtcgatggcggctttgacggtgtcttgcagggctttttcggagaagtcggcagtactggcgcggcctttgcgtttgccgacgtaaacggtaatgtccagcgacttgtcctgctggaactcgatttgttcgatttcgcccagccgcacgctgacgctttgtcccaatgattcgctgaaatcggcttcggcggcggttgcgcccgtcgcttttgccaagtcgagcgtgcggcggcagaggtcgaggagttcggaagcggtgtggttgaacagcatagaaatctttcttgatgatgctttgcggcattttaaccgtttcgggcggcaggggcaaaagcgcgccgtttgcagggcggacggtgcaaaatgccgtctgaacgcggcggcattctgttaaaatgcgctattggaaaaattcgagaatcaagatgtttgaacaagaagacgaatggatcagcaaaacccaaatgaaaaagcagatgaacgatttgcaggatttgggtatggcgttgaccaagctctcaaacgatacgctgaaaaaaatcggtttggatgcggatttgtacgaggcggtaaccgcctataaaaaaatcacatccaacggcgcgctcaaacgccaggcacaatttatcggcaggctgatgcgcgataccgatcccgcgcccatcgaggcgtttcttgccaagctgcgcggcgacgatgcggcgcacaacgcctttttgcaacgcgtggaacaggcgcgcgtacggctgttggcagacgacggcgcgttgacgcagtttatgtcggattttccgcatgcggacgcgggcaagctgaggacactcatccgcaataccaaaaaagagcaggagcaaaacaaaccaccaaaaaatttccgcgccctgtttcaagagttgaaaaccgtgatggaaaacggggacgcggaaatttaggcatattttcagacgacatccgccgttatttagattggaggataaaatgttgttccgtaaaacgaccgccgccgttttggcggcaaccttgatgctgaacggctgtacgttgatgttgtggggaatgaacaacccggtcagcgaaacaatcacccgcaaacacgttgacaaagaccaaatccgcgccttcggtgtggttgccgaagacaatgcccaattggaaaagggcagcctggtgatgatgggcggaaaatactggttcgtcgtcaatcccgaagattcggcgaagctgacgggcattttgaaggcagggctggacaaacccttccaaatagttgaggataccccgagctatgctcgccaccaagccctgccggtcaaactcgaatcgcctggcagccagaatttcagtaccgaaggcctttgcctgcgctacgataccgacaagcctgccgacatcgccaagctgaaacagctcgggtttgaagcggtcaaactcgacaatcggaccatttacacgcgctgcgtatccgccaaaggcaaatactacgccacaccgcaaaaactgaacgccgattaccattttgagcaaagtgtgcctgccgatatttattacacggttactgaagaacataccgacaaatccaagctgtttgcaaatatcttatatacgcccccctttttgatactggatgcggcgggcgcggtactggccttgcctgcggcggctctgggtgcggtcgtggatgccgcccgcaaatgaacagcaatgccgtctgaaaagctttcagacggcattttaagcacacacgcacagtaaaaccccacgttatgtcagtcaaaatccaaacccgatccgtcaataccgacgtttttaatcatttgctcaccgccggtgccgatcctttaatcgcccagctttgtgcttcgcgcggtgtgcaaagtcctgccgaattggacgacaaactcgcttccctcctgccttatcaatcgttgacgaattgcgaagccgccgcccgccgtttggcggatgcggttgggcgcaaggaaaaaatcctgattgttgccgactatgatgccgacggtgcgacggcgtgtgccgtcggtatgagcggtttggcggcgatgggggcgaaagtggatttccttgtgcccaaccgctttgaacacggctacggcttaacgcccgaacttgccgaaatcgctgccgcgcagggcgtggatttgctgattacggtggataacggtatcgccagcatcgcaggcgtggcgagggcgcaggctctgggtttggatgtcatcgttactgaccaccacttgccggccgagaccgtgcccgactgcatcatcgtcaatccgaaccaaaaaggctgcggttttccaagcaaaagcttggcgggcgtgggcgtgattttttatgtattgatggcgttgcgtgccgaattgcgccgccgcaattatttttcagacggcatcaaagagccgaatttgggcgaacttttggatttggtcgcactcggcacggttgccgatgtcgtccctctcgaccacaacaaccgcatcctcgtgtcgcaaggtttgaaacggatgcgctccggcaaaatgcgccccggtatccgcgccttgtttgaagtggcgcggcgcgattggcgcaaggcgcagccgtttgatatgggttttgcgttgggcccgcgcatcaacgccgccggacggctggacgatatgtcggtcggcatcgcctgcctgttggcgcgagatgattccgaagctcaggaactggcggctcagttaaacaacctcaatatcgagcgccgcgaaatcgagcagtctatgctgcaagacgcactgaatgatttccccgaaaccctgccttcaggtcagatgactttggtggcgtatcgcgacgacttccatcaaggtgtggtcggcattgtcgccagccgcctcaaagaccgtttttatcgtccgaccatcgtgtttgcgcctgccgacaacggcgaagtacgcggttcgggacgttccattcccaatttgcacctgcgcgatgctttggacttggtgtccaaacgccatcccgatttgattttgaaattcggcggacacgcgatggcggcgggtttgagcatacttgaacacaacattcccgcgtttcagacgacctttgaagaagccgtgcgcgaaatggtgtgcgaagacgatttgtcgcaaaccttcatcaccgacggcagcctgcccgcctgcgacatcacgttggaacaggcgcaaaaccttgcccgtcacgtttgggggcagggcttcgcgccgccgagctttaccgacgagttccacgtcgtccgccagcaacctttgggcgcggagggcaaacacaaaaaagtctggctgcaaaaagacggctgcgaatttgaagcgatgttttggcgttgcagcgaagacattcccgaatacatccgcacggtttaccgccccgttgccaacgaatggcgcaacaatctcgaattgcagctgtatatcgattactgggaagccgcgtagaggcggcggaacactgtttgaatgtgatttctgttccttcatttgcctgtttgtacgacgggaatgttcccaatcggagaaggcgcatcaaatttcagactctgccacaaaagcagggtctgatttttttggagggcaatctgttataatgacgcgttgccgccgcgagggcggcgtgattcggacggcgtagtttctacgccttttgtttatggttacggcatcttgcaaaccgcgcctgatgccgtctgaacacggttgcctgtggagatgccgctcttcgggtcagaatatttatgctgaaaaaatggttgaataagatgctgccttccggtcggagcagtaaaaaagcggaaagtaaaacggtcattcctgccgaaagacacaacatccgtgccgaaatgttgagctttgccgccgaaaacgtcatacgccgcctgaaagggacggggtttcaggcttatgtggtcggcggcgcggtcagggacctgctgctcggcatcgaacccaaagatttcgatgtcgcaaccgatgccacgcccgaacaggtgcacaaactcttccgccgcagccgcatcatcggcaggcgttttcagattgtccatgtgatgaacggtgcagagactatcgaagtaacgacgtttcgcggcggtgcgaaagtacatcagaatgcacgcggcaggattatgaaagacaatacctatggcagcatcgaagaagatgcgatgcggcgcgattttacctgcaatgccttgtattacgatcctgaaaaagaagagattttggatttccacaacgggattgccgatgttgccgcccacaggctggttatgattggcgatgccgccgaacgctatcaggaagaccctgtcaggattttgcgcgccatccgcctgtcgggcaaattgggctttgagctgtcggaagaaaccgccgcaccgattgccgaatcgatatgccgtctgaagcacgaaccggtagcgaggctgttcgacgaaattatgaaattgctgttttcagggcacgctcgcgagtgtctaaaacgtttgaacggatttgacataccggacgacatccatctgctgctcaatgccttgcgcgtttcagacggcatcgccggaaaaatgacggtgcttgccctgaaaaataccgatgagcggctgcgtgccgacaaatcggtttcggtcggttttgtattggcggctctgatgtggcccgagttggaacgccattggaaaagcaatctgcaacagggtttgaaacccgcgcccgccctgtccgatgcaatcaatacgatgcgcgaaaccgtcgaacgcggttggggcgtgccgcaacgcttttccgccacgatgcgcgaaatttggatgttccagccgcagtttgaaaaccgcaaaggcgcaaggccgcacaaactgtttgcacaggcgcgtttccgtgccgcctatgatttcctgctcttgcgcgccgaaaccggcaatgcggaccgcgcccttgccgagtggtggacggcgtttcagacggcatcgacggaacagcggtcggagatgaccaaaaacgaagccgccgcccgacacgaaaaaaacgaaggacaggcgaaaaaacgccgccgtcgcaggcgcaaacccaagccgaaggttgtgggaacggattgggaataagggtcaacagacatggagcaatgaagtttcaacacatgggatgaagcataaagtgccgttctatgcattatcctgatttgtaaggggattcatccccgtaaataaagtctaaccctgcctctcggaaaaaggatgtccgggtgggcagggttcaagcaacaaggaaaaattgatgaaaaaatgtattttgggcattttgaccgcgtgtgccgccatgcctgcatttgccgacagaatcggcgatttggaagcacgtctggcgcagttggaacaccgtgtcgccgtattggaaagcggcggcaataccgtcaaaatcgaccttttcggttcaaattccaccatgtatgtatgcagcgttacgccttttcagaagacgtttgaggcaagcgatcggaatgaaggcgtggcgcggcagaaagtgcgtcaggcgtgcaaccgcgaaacttcggcaatgttttgcgaagatgaggcaatccgatgcagaaaattcgattgatgtatcggttggacggataaagaaacggatacggatacggagcttggcttccgtatctgtttttctctgcctgattttccatgcatcgggtttcagacggcattggaatgtcagtcgtgttctgccgattcgtaggcttcgacgattttttgcaccaaaggatgccggacaacgtcttcgccggtaaaggtgtggaaatacagcccttccacgttgtgcagtttctcacgcgcatcttttaatcccgatttgatgtttttgggcaggtcgatttggctggtgtcgccggtaatgacggctttcgcgccgaagccgatgcgggtcaggaacattttcatttgttcgggcgtggtgttttgcgcttcgtcgaggatgatgtatgcgccgttgagcgtcctgccgcgcatataggcgagcggggcgatttcaatcaggcctttttcaatcagcttggttacacggtcaaagcccatcaggtcatagagggcatcataaagcggacgaaggtagggatcgactttctgggtcaggtctccgggcaggaagcccagtttctcgccggcttcgacggctgggcgcactaaaatgatgcgttcgacttggtgtttttccatcgcatcgacggcggcggcaacggcgagataggttttgcccgtacctgccggcccgagaccgaatacgatgtcgtggttgagcagggcgcggatatagccgttttgccgtggcgttctgccgccgatgctgccgcgcttggtgcggaaataataggcgtggtcatggtttttttcttgatgaccggcatcttcggtttgggcttcgacggcggcaagcctgatgtcgccgtcgtttaggtcgcgcgtctgcgccgtttccaagagtttgagcagtgcgcgtttgccggcgtgtgcaaatgcgccgttgaaagtgaaatgttcaaaacggcggctgatgtggatatcgagtgctttggcaagtaaatcaaggttgttgtcaaaagaaccgcacagacgctgcaacgccaagttgtcggtttcttctaaatgcaggtggacggtatgtgtcatatgaaggtccgaatagttggatattgtgtgattttaatctatagtggattagatttaaaccagtacggcgttgcctcgccttagctcaaagagaacgattctctaaggtgctgaagcaccaagtgaatcggttccgtactatttgtactgtctgcggcttcgtcgccttgtcctgatttttgttaatccactatatttcaccggtattttcttaccgtattctgcgattgcctgtcggaaaatgccgatcaacctgcctataacggcattttcgccaaattcgttcagacagttttctctaagtcgggcaggttcgaaatcagagtggtgttcacacattttgatgagtgcgtcggcaagggcatcgtcgtcgtcaacaggaaccaaatatccgttgccgtctgaaacaatagattccgcaccgccgcagcgtgttgcaatgacgggcaatccttgggacagtgcttcgatatagactacgccgaaggtttctgtgcggctggcaaggacgaatgcgtcgctgttcctcatcaaatccaagactgcttcgggctgcaatgcgcccaaaaatgtaacggcatgggtaatgcccaagtctgccgcctgctgtttcagccgctgttcttcctgtccgctgccgccgatgttcaggcgcagttgcgggcattgtgccaacgcccgggcaaaggcagtgagtaggacatcgtgtcctttgagacggcgaaggtgcgagacggtgcagaacacgaaatgcggtttgttgttttttttctctttgttcaaacggtcggttgaatattccgcccagtatgttgggggaggtactgccattcgcagccgtatttgtgttgcaggacgtgtgcgaaatggcggctgacggcgagacgtgcggcggcgtgtgccgccgcatttttcataggctgccattggtgcgggcgcaccaaaccgcgcgtaatggtgctgctgtgttccgtgacgacataggggatgccgtatttttgggaaatcttgaaggcaagtatgccggcatagttcatacagtgggcgtgaatcaggtcgggcagcccgttttcgcggatgtagtgtttgaaagctttcaaacccgcacacacccagcggatgcggtcgatgtcgatgaacggaaagcgggggaagaaatacatgccgtgccatgcatagatgtccaaaccgctttgccgatatagtggattaacaaaaatcaggacaaggcgacgaagccgcagacagtacagatagtacggcaaggcgaggcaacgctgtactggtttaaatttaatccactatattttgcaaaaccgtaagggtcggtcaggatgcttgctgtttctttccgcaagtagcggaacatcggtgcaagcacggcggttttgatgcctttcctctgcaatgccagtgcctgattttgaaaaaaatcccgtccacatcctgttcggattgcggataccatgaggggatgacgaggacgtgcaagggttcgggcatagtgggattccgtatcggaaaggcggttattataagacagacgcagaccgaatatttaaattgttgccttacgctaatgcaatttggcgcgccggtgtgttagattggcagttttatcggtaaggaggcggatatgttgcgtcttgttttggcggcttcgctgtcggcggtatcttttccggcagcggctgaagcattgaattacaatattgtcgaattttccgaatcggcgggtgtcgaggtggctcaggatacaatgtccgcacgtttccaagtgacggcggaaggacgggacaaaaatgccgtcaatgctgagtttgttaaaaaattcaacaagttcatcagaaaatcgaaaaatggtagctttaaaaccgaattggtatcgcgcagtgcgatgccgcgctatcaatataccaacggcagacgcattcaaacaggctgggaggagcgtgcggaatttaaggtcgaaggtagagattttgatgagttaaaccgttttattgccgatattcaagcagatgccgcgttggaatatacggatttccatgtgtcgcgcgaacgccgcaacgaggtcatcgatcaggtcagcaaggatgccgttttgcgtttcaaggcgcgtgccgaaaagttggcgggcgttttgggtgcgtccggttataaaatcgtcaaattgaatttgggacacatcggcagccatatcgcgggagggggagctgctcaggcaaaaatgcttcgtgccatgccgatggcggcaagcgtcaatatggagggtgcggattccgccgcgcctggtgtggaggaaatcagcatcagcgtcaatgggacggttcagttctgatttgaggtgaacggcaaatgccgtctgaaacccgacgataagggttcagacggcatttatatttcaggctttgggcagggtaacgccggtttgccccatatatttgccgttgcggtctttgtatgaggtttcgcagatttcgtcgctctcgaagaagaggacttgcgccacgccttcgcctgcgtagattttggcgggcaggggggtggtgttggaaaattcgagggtaacgtagccttcccattccggttcgaacggggtaacgttgacgataatgccgcagcgggcgtaggtggatttgcccaagcagacggtcaggacgttgcgcgggatgcggaaatattcgaccgtgcgcgccagtgcgaaggaattgggcgggatgatgcagcagtcgtcttcaacggtaacgaagtttttcgggtcgaagtttttgggatcgacgatggtgctgttgatgttggtgaagattttaaattcgtttgcgcagcggatgtcgtagccgtagctggacgtaccgtaggagatgatgcgtttgccgtcggcttctttgatttggttcggctcgaaagggtcgatcatgccgaattcttcgctcattcggcgtatccatttgtcggacttgatgctcataatgttttccttgtttcttgcagtgttcggacaaagcattgggggatgccgtctgaaaacggggcttatttgtttttgggcagtttcacttctttaatcatgccgttttcgcatttcataatgaagagggtttcgccgttttgcgagacggtaaatctgccgtgtgccaagccttttttgaacgtgcccgagagtaccatgttgcggaatttggtactgtcggaattgaacggttcgataaatatttcgcggttggcggcaacggtataaacgccttgcccgtcgaatttgccgtttttaaacgaaccggtatagttgcgcccgtcttggcagcgccatgtgcctttgccggcgggtttaccgtctttgccgacattgccgtcgtaggtgcagcctggttcttgataggaagtcaggacggcggccgaagtggggagggcgaacatcatggcgggcagtaggaatgcgagatgtttaagcataagggttattccattggattttggttgacggtattttgtcgtgaaaaagccgtctgaaaaatcaatcttgccagccgcccaaataggaaaccagttcttccaacatggtgctgacggattccgccatcagaatttgcgaggcgaaggcaaggccggcggcatcgtcgccgttgctttcggcttcttcctgcaatacgtcgaggtattggatgcgcttgagtgtgaagtcttgagtgaggataaaggcaatttgttcgcgccacaccaagcccagttgggtaacggttttaccgtttttgacgtgttgaaccacttcgtcggcggttaaatcttgtttggatactttgacgacgggaacaatatcgcccgtacctttgagttcgcaatcgctgtctaattcaaaaccgccttcgcaatgcccttgcaacagccagccggtcatcaaggaagagggcgattgcttggtattcggcagcgaggcttccaaaccgcccaaagcttcgcgcagcttggtcaggatgttttctgctttggcggaagccgcgttattgacgagcaggtagccgtggcgggtgttaaacaccgcttctgtacggctgctgcgggtaaacgctcggggcagcaggtcgtctgtaatttgctctttaagctcttgtttttctttacggccgacattgcgggcttcattgttttggatttccgctaccttctcttccaaaatatcgcggatgacgccggcaggcaggactttttcttcttttttcagggcgacgcgcaaggtaaagtcggcagggaaaacgagttcaggggagaatgaaaccggtgcggtaaagccttcgctgaaccagtctaagccttggcaatgggtaaattcagcttcagcaagtttgtcggcaagtacgtctgcctcaggcagcttttctttgttgagcggataaaaactaatctgcttgaaccacataatgtttcctattgtttgaaatgtcgggaattatttgctgaattgttttttcacactgactttggttttcttcttgaagcggtttttctcttcctttcggccttcgcgtttctcaatacggttgctcaggctgacgcggcgcagcggttttttcttcggtttgtcttccgcattttcatacgggttttccgaaacattgtattgaattctgagcggcgtgccttgcagattgaaggctttgcggaacgtttgggtcagatagcgcgtatagctgtcggaaatcgcgtgcagcgaattgccgtgtaccacaattacgggagggttcatgccgccttggtgggcataacgcattttcggacgcaccaagccggcacgcggcggttgctgacgctcgatcgcgctttgtaatacgcgcgtgattttcggcgtcggcatcttaatcatcgccgcgttgtaggcagcctgaatgctgtcaaacaaaccgtctataccgcgctctttcaatgcggaaataaagtggaacttggcaaaatcgaggaaatacagtttgcggttgatatcgcgtttcacttgctcgcgacgttcttcgctgatgccgtcccatttattgaccgccaccaccaaagcacggcctgcctccaaagcgaaacctgcaatcgtcgcatcttggtcggcgatgtcctgctgcgcgtccaataccaaaacagcgacgtttgccgcttcaaccgcctgcatcgctttgataacggagaatttttccactgcttcatccactttgccgcgacggcgcacacctgcggtatcgatgatggtaaacggtttgccttcgcgctcgaaatcgatatggatactgtcgcgcgtcgtacctgccatatcgaaggtgatgacgcgctcttcgccgagaatggcgttaaccagcgtagatttgccgacgtttggacgaccgataacggcaaaaacaggatgtcttgcatcggcttcttcggcttccggctcggggaatttttccaaaatatcttcaatcagataatacacaccatcgccgtgtgcacctgaaataacataagggtcgcccaaagcaagttcgtagaactcggcggcaagtacagccctattgcccccctcgcctttattcacggccaaataaacagggcgcggactttggcgcaaacggtcggcaataatcttgtcttgcggtgttaaaccggtacggccgtccaccaaaaacacaactgcatcagcttcatcgacagcctgtaaggtttgttttgccatttcgtgcaaaatgccgctgtccacaaccggctcgaaaccgccggtatcgatgaccaaataaggtttgctgccgactttgccgtgtccgtaatggcggtcgcgcgtcagaccgggcaggtcatgcacgagcgcgtctttggtgcgcgtcaaacggttgaataaagtagatttgccgacgttggggcgaccaacaagcgcgatggttggtttcatgattgagtctttctgtgtcaagtgccgttcgggagaactgaacacgagcaggtgtccgttggacacggcggatgggttttacgggaattgccgtaggatagtgttgtctgaaatgccgtctgaagagagggtggcatttcagacggcatttatttcagcgaatcaagtttcatttgaaccaattcgcgaccgacagaatcttgaggcattttttctaaagcctgtccgtagttttttaaggcttcctggctttttccctgtgcggcatagacatcgcctttggtttccatcagcaggggggcgaagtccgcttcaaccggcgtatcgagcgcggcaagcgcggcatcgtattttttttgttgcaacaacacaacgcccagacgctgcgccgccaacgcttgaatcaggctgtctttttggttggacaacacccatttcaaatggccttcggcaacatcgtaacgctgcgcgtcaaattcggttgccgccgccatcagtgtggcttgggcggcggaaatggaatgcgggtagctttgttggagtttggtcaattcggcattgatttcgctttgcggggctttgctttgcgccttttctacgatgtttgccagcaccgccgccgcttcctgattttgggaaactttacggttttggtaaaccgtgtatcccaagtagccgagtgccgccaaaatcagcaaggcaaacagccatttgcccgtggttttccaaaaatatttaaagttgtctaactcttgttgttcttcgagatgggctgccatttatgcgttcttccattgttgtaaagtaggggttaaatcctcggcggcgacagtttgctgaccgtgtgcgccgttcatgtctttgagcgtaaccgtaccgttcgccagttcgtcttgcgcgacaatcagggcaaagcgtgcgccgctgttgtcggcttttttcatttgcgctttcaggctttgatagccggaatgctgcattacattgaaaccttgcgcgcgcaaggcttgtgcgtatttcatcacctgcaagtccgccccttcgccttggtgcattgcatagacatcaggcgcagcgttcacttccagagagccgtattcgctcaccaaaagcagcagccgctcgatacccattgcaaagccgatagacggcgcaggtttgccgccgagttcttcaatcaagccatcgtaacggccgccgccgcacacagtcgcctgcgcgccgagtttgtcggtcgtccactcaaaaaccgtctgattgtaataatccaaaccgcgaaccaagcgcggattttcaatatattggatacccaaaccatccaacatcgccttgaagcgtacatagtggttttgcgaatcctcgcccaagtaatccaccaaacgcggcgccgcgttgcagatttcctgcaaatctgggtttttcgtatccaaaacgcgcaaaggattggttttcagacggcgtttgctgtcttcatccaatttatcttcataacgggtcagatattcaaccaatgccgcacggtgtgccgcgcgttcctcacggttgcccaagctgttgatttccaaagtcaggtattcgcggatacccaatttttcccataagtcggcagacatcgcgatgatttccgcatcaatatccggcccttcaaaacccaaagcctcgataccgacctgatggaactgacgataacggcctttttgcggacgctcgcggcggaacatcggccccatataccacagcttttgcgggctattgtacagaaggttgtgttcgaccaccgcacgcaggcaggaagccgtaccttcaggacgcaagctcaaactcaaagaatcgtttgaatcggagaaggtgtacatttccttgccgaccacatcggtttcctcgccgatggagcggacaaacaaaccggtttgctcgacaatcggcgtacggatttgctgataaccgtaagcgcgtgtccagcggccgaccgtatcttcaaacgcctgccaaaacgcagccgtcagtttgaaatctttttgcttgacaggcagaaggtcgttcatgcctttgacggattggattttttgtgccatttcaagtaagaatgcttaaatcaaattgcgggcgattatagcggattttaaagggtttgtgaggttggaggtggtttgcggacggcatttgacttactctgcacgtgcttgcctgatttgtccgactgtaaactccgtctgccgttttgggtgttgtgtgaaaaacaatttatttgaaattgtctcggcttttttcggtatgacagccaaaatcttacctgccaaatttccctcacgggtttgccaagcatccaaaaactgcgccctgctcattgaaacatgccccagcgacgggtcggcaagcaaaaccgtattgccgtctataccgcgcaataccgaaaaatggtcgtctttgcggtatttcagatacacgatgacggggattttcaactgcgcgagctgctcgaaagacagggcatagcccttcgcctcaaaacccaaatcaggcataatgcgccgcatatcctcaaacgacgcgcgcatctgctccttatccagctttttcaacacttcttcttccgtcagcgtttgcccgtaaaaattgttcaaaagcgtcgccaccgaagccgccccacaggaaaaatccaaatcctgctttacaatattgaaatcccgccgcgctttccaactctgcactttgatttttccgtaaacaacaggattatcgttaaacatcggtgcagcattcaaacgataagataaagaaacgacaacacacgccaacagaaaaacatatttgaacttcatcatattgtccacataaagggcagcctgaaaatctttcaggctgcccttgtcaaattattcctagctttcggcttttttggcaaaccaaacaatccgattacccgcataatactttccatttattgaaatccgacaagccgcgcccaaaaaatgccatgcactgtcgatttccgcagcaatctttgtaccgttttcttcaaattccaaatattcacccaataataaacttgaaacagaacgcgtgggcagcaagtgcccaccctacgcttattcaaataatttgattaaataaagaataaagaaaatgcatcaggaacaaaattataatctgccacctgactcacaccgcttttaaagtaaggggcatcaaaatcaaaaccgcaaaaaaaataatttttgcattgatttttaatagatttaaaattcgaatatagtgtttctctagatttaaaaagtttatctttatctatatatttgatgctttccctatccaaaataaatatttcaaacattaaaaaatcattacatgaccaagccaaatcataaatttgattcaaatgggtatcataaagataaaaataataaggtttgggaacaggtaaaatatttaatggaaaaggaggactaattttcttaatatctgatgactgatatccatatctttctatattcttaaaaatttcatctttcttaagataacaagacattctgacaatcacaacctgttcatcggatatattatctatttgcatggcgcgtataacacgccatgcctgattaaaattagtctcccttaccttaaaatctattatcttttccaaagatgaaaatgccccttatcttgaactctccagttagaacctggaagtttcgtacctcttaaatgtgtattaatatttcttatagtttcattaaaatgccacgcgctgccgatttcaacggtaattttcgtaccgctttcttcaaattccaggtattcccccattagctaacgcaaagaagcagacgccatttcggcttcgttatgataaacccgccttccgttgatatagacttccgcccctgtccgctccaaattccaaaaattccgtactgaaatttccatatcccgatattgtgcagaccatgttttttcgaaggttttcataaaatttcctatacctgtccaatcggcacatatcaattgcattattacatctcaatacgataaatatttcttaagtcaaaatgcaagcctgaccgtaccttaactgtcaaaattttattattttttattgattttaaaacaatttctgtaaaattctcttcgctttctctcttttttagaagcacataagaaaaaataaaacttccccgattaaattcataaatatgtttcaaccattcgcctcctctttctgtaagacaagattcagtttcattcttccttattgtataaatatttccttcacaaaatctgaaataaatccataaatccatcttatccataattaaagaaaaagtttcacctcgagattttgtcaacaattcgcaaggttgcgatgttgcaatcaaatagccgaaagacattttttacctcatacatggtcgaaatcagtttctgttagttcagaatccattttttcgtcaacaactgaatccgcatttttgaattaacgttttcatcagctgccgtttatctaaaccggcaggttcagtttcaaaataagccttatatgaagactgtaagcatttcagaaaaagatcatcagaagacatatctgccgaatcaaatacaactgttttgattttggtacttacccaaaaccctttttgctctttttctactatacggaaattcagaatatttccaaccgaatcaaaagcacggtaaacatcatccatcaaatcctgcggctctattttcttttccaattccgacaatccttgaaatatatccaaagacacatcttcaaatagaaaaaaaggaggagttagaagcggtttttccatgatctgtccgtagattttgattcccaagggcgatgacgaccaattccctgtccaggcaaagtcttgcccgtattatccgtaactcgacgatgataatggggaaattttccaataggatgacctgttctattaccgaaaggggctatccgcatattattgccgattttaatctcacgtccatatttagcaaaggaaacaacctttcctgcggcgcctacaccaccaggaattgcgcctaatccgccagcaatagcaacatctctaacagaagctggtctgcctgtcgttgcataactaaaaccatgctgtgtccacataccaatggcagcaccacccaagatagccaatggaagaaacgccccctctgtctccttcatctccttttgagaaagctccgccaactgcatcggtgcatctgcccgcgtgtggaacacttggtcttcaaatgcctgattgtccaagccgtttgccattgcgggggcaatcatagacagcatcattacggctgcggtgatttgttttttcataataactcctttggattacaaggttggaaaatcaaagccctgcttagaacgtatgttgcacacccaatttcaataggtaaatcagattgcaaatccagcaatttgaatattgtcattgttccgtgcaaaagggatttttattgatgagttgtgtactgggtttcagcttggctttttagataatcttttcacaagaacatacatcaatactgtccaaaaaaaaagatttgataaatatattgcaacatattttattccacctccatccgaaacagaaaccaatatatttttaattaatacatagctgattattacatttattattcctataatatataaggatcttgccaaaattttttttgattttattttaggaatatctcttatccatgctaaaatacagcccaatgtcgaaaagaaaataacagcaaacactaccttacctcctctcacttccaaccaaaccgatagcaggtttggttggaagttggtttatttattatttaacggcgaatgtcagtgttcttacccgtagaacctgcataaccatttatgccaccagcaacagtccccactgctacacctcgcataccattaatcagaattcttcctattttttcgaatccactatttcttccaaagatgcagcaaacgcaggttgagcctagacccaatctacgtttgctgccgcatctgatccctattgtttcttatccttacatcttcctgccttgtcaatcaaataaagacagaagactatacaaaaactgaccgacatactgaaaatacctatccccttccatgcaatctccgcaccattgacccaatagattagactgagaaacaacaaagccacagtataaatcaacgtaaaaaatattgcgtaaagcacaataaagggaacttttatctcacggttgttttttataatatattcagcaacttgatttccgaatatacctgataaaaaatatagtattagatcatccatttcgtttatcttctatgttttcccattgcggcgctagaagactgatttaatgctgcaccatttgcacgaataactgcattaggaatagcatttccccctttccaagcagaacgggcaaaaacactagtagtaatccctgcaccgcgcaacatcgcactgctatatccgccgcctatcataccaccagcggttgcagccaaggtacttcttgttgaagcaaattgccctgttttaattttagaaatgccgtgattagcccaagcactaattgcccctcccatcaaagcacctgccacaataggaagaaacgccccctcagtctccttcatctccttttgagaaagctccgccaactgcatcggcgcatctgcctgcgtgtggaatacgtatttttcaaatgcctgattgtccaatccgtttgccattgcgggggcaatcatagacagcatcattacggctgcggtaatttgttttttcataataactcctttggattacaaggttggaaaatcaaaacctgcttaaaatgtatgctgtacgccaaatttcagttcggaactgctttgccctgaaacgttgaaacgtgcggatgcgtttaaagccgtggttttggtgaaaccgaaacctgcgccgaaatgggcgtaggtggatgtgtttctggaggattcccgtttgccgtccgtccggtcgggctgcctgcccagccattggatgcctccggtcaggctgattctgtcgttggcagcaaatgagatgttggggttgagcagcaggtagttgcccgatttgtagcggatgccgtctgaaagggttttgctgccgttgatgcggtaggcggcggtgagggaaaggacaatcggatctatggctttgtaggtggtggcgccgatgagccaggattttcccgacgaggctttgttgcgcgatttttcgtaaaccgtgctttcaagaaagctgattagggcggggtttttgtcgtctttaaggaaagtgtggctgatgccgagggatacgtcggacatccgtttgttgcgggttttgctgttgccgtcgagtttgcgttcttcgtgccacagatagctgccgctgccgtaaatgtcggtattcccggtcagtccgtagcgcaaaccgagcgtgccgacgagcatatcggtattgctgccgttttcttggatttcggtcggaatggggataaacgaggttgcgccggtttgaatgtaaaccggtgcggcaagttcggcgcggttgttttcgctgttcaggtaggtaagggaagtttccagtttccattttcccttgtcggtcattatgtcttcaatcgtcaagggcaggtcggcataagtggataaaggcaggatggcgggcaaggcgggcaaaaagatgcgcttcatatttctcctattgatattaattcttatttactaataataatgaatatccgataatcttgtctaaataaatttttaaatcataaaaaacaatatgtttgtttttgtcaattatgtttcgatatgccgtctgaaaagtttgtgaaaaacggttacaatccgccgcatgaaaaaacgcaataatcctcttccgctgttgaacggtgtcaaacccagttatttggtgctgccgcatgaaaagcagttttacgggctgccgctgctgcattttctgtgcatccgctttccttttgtgggcgcggacgattggcgcaggcggttgaacagcggttttgtggtcggttcggatggtgcggcgttggacgaacattctttgttcgagccgggtaaggtggtgttttattaccgtgaaaccagccgtgagagcgagccgcgtattccgtttgaagaaaagattttgcatattgatgagcatttgattgtggtggacaaaccgcattttctgcccgtcatccccagcggcaggtttttgcgggaaaccctgctcacgcgcctgcgtttgcggcctgaattgcagcatttgaatgttgaggacattacgccgctgcaccgcttggacaaggatacggcaggcgtgatgctgctgtcgcacaatcctgccacgcgcggagcctatcagacgatgtttcaaaacaaaacggtatggaaaacgtatgaggcgcttgcgccgacaaggacggatttgccgtatccgctcgatgtggtttcgcgtttggtgaggggtgagaaattttttacgacgcaagaggcggaaggcgaaccaaacgcacatacgacggtcgaactgattgaaaacaggggggaattcagcctttaccgccttacgccgcatacgggcaagaaacaccagttgcgcgtgcatatgatgggtttgggtatgccgctgttgaatgacgcgctctatcccgtgccgtctgaagcgggcagcgaggattatcggaaacctttgaagctattggcaaaaaagattgcgtttgcagatcctttgtcgggtcgggaaagggtgttttgcagcggattttgcctataatgagagggaacgcaaacccgtatcggcggatgccgccgatacgggttttacattatcgatgccgtctgaaaggggttttatccgttcaggcatacgggcgcgaagcggaggatggtgtcgcgcaggacgatgagtttgccgtgaaagaaatgcgtggaaccggcgatggtaatgacgggcaaatcttgcggttccgcccatttcagtgctttcccgatttcgacgacttcgtcttccgcgccgtgtatcatcagcgttttggcaacgttgggaacggcggacggttccggacggtcggtatagtggcagactgccgcgccgatgagcagcaataaatcgggtgtgcgcgcttgtgcggcaaatgtggcgacataaccgccgaaggagaagccggataaggcaaattcgggggcttcggggtgttgggcgcgggcataatcgatgacggcgaggcagtcttgcgtttcgccgcgtccgtaatcatgtgtgcctccgctgccgcctacgccgcgaaggttgggcaggtagcagtggaagccgagtttgcttaaggctttggcggcagtttggatgactttgttggtgtttgttccgccctggagggggttgggatgattgatgacggcaacaccgcgtgccggtacttgttcggacgggatatggatggtttctaaaatgccggcaggaccggatatgtgtatggtttcgggtttcagcataatgatttcctcttgattttccgcatgttccgatgcagccgtgaagatagttgcttaaaggtggaaatgcttgccgttgttggggttggacgctttcaggccggcaagcatacggtggaagtccaatccgtatgcgttgctcagtttgtcggcacgttttttgagtttgtctatgttttgctctttggggctgctttggaaggccattaccgcgacattgccgtggctttcggcaggaagttccaagacgcgcccttcaaaaacgctcaacaaccgttcgatgaagcgttggtagcgtttgtcgccgctccaccagttggttacgaatatgccgtctgaagagagtgcgttgcggcagtctcggaagaacggttcttcaaccagcgcatcgatgatttgttcgccgtcgaacccgtccaccaaaatcacatcggtgttgtggcggaagactttgatatattctgcaccgtctgcttcaataatttcaaatttctcgccctcgaaaggcaactcgaacaggttgcgggcaatggcgatgacctgcggattgatgtccacggcggtttggcgcgtgtcgggcaggtaggtatctatccagcgtgcaaacgagccgccgcccaagccgatttgggtgatatgttgcggaagagcgtcggtaaacagcagccagcccatcatcgcgcggctgtaagagagcaccagctcggacgggtggtcgaggttcatcgagctttgaacggtgtcgctgcccaagtgaagcgaacggatattgccttcttcggaaatgccgacttcgggaaagccggattttgcaggacgcaggcggcggtagggatgtcttgccatcggtgtgaacggtcggtttgaaaggcggatattttatcagaatgccgatgcttgttctgtttcaaattaatttcttttcaaataaattacttattcggatttgccggggctttcggataaattccttgccaaggtgcggcattgcctgcataattcgctttctttgccggtatagctcagttggtagagcacctgacttgtaatcagggggtcccgagttcgactcttggtgccggcaccatttctgctgatggtgttgcaaaacatttcagtaagccggtatagctcagttggtagagcacctgacttgtaatcagggggtcccgagttcgactcttggtgccggcaccagatttgacagtccgattgtgtaaaacagtcgggctgttttgcatttgcggcacggtcggtggcagggctgcgggcatttcactataatagcccgtttcaaactgaaaaggccgtctgaaaagggcggggtaacaatatctgatgattactgtgaacacactgcaaaaaatgaaggcggcgggcgaaaaaatcgctatgctgaccgcttacgaatccagttttgccgcgctgatggacgatgccggcgtggaaatgctgctggtcggcgattctttggggatggcggttcaggggcggaaatcgacgctgcccgtcagcctgcgcgatatgtgttatcacaccgaatgtgtagcacgcggtgcaaaaaatgcgatgattgtcagcgatttgccgtttggtgcatatcagcagagtaaggagcaggcgtttgccgccgccgccgaactgatggctgccggcgcgcatatggttaaactcgaaggcggcgtgtggatggcggaaacgactgaatttttgcaaatgcgcggtattccggtttgtgcgcacatcggtctgaccccgcaatccgtgtttgccttcggcggatataaagttcaggggcgcggcggcaaggcgcaggcgttgcttaacgatgccaaggcgcatgacgatgcgggggcggcggtcgtgctgatggagtgcgtactggcggaactggcaaaaaaggtaactgaaactgtttcctgtccgaccatcggcatcggcgcgggtgcggattgcgacgggcaggttttggtgatgcacgatatgctcggcattttcccgggtaagacggcgaaattcgtcaaaaactttatgcaggggcatgatagtgttcaagcggcggttcgggcgtatgttgccgaagtcaaagccaaaaccttccctgctgcggaacatatttttgcagattgagcggtttacatgcagcatgccgtctgaaagccgtttcagacggcattttgttttgccgtgcgcggcgcgtataatcggcgcgttttgtcgggcaggaagcccgaaggataaggattaccgttatgcaaatcatacataccattcgagaactgcgcgcgtggcgtaaaaatgcgggaaaggtggcatttgtgccgaccatgggcaatctgcatgaaggacatcttgcgcttgtgcgtgaggcgaaaaaacgcgcggacagtgtcgtggtcagcattttcgtcaatcgcctgcaattcggtcagggcgaggatttcgacaaatatccgcgcactttgcaacaggatgcggacaaacttgccgccgaaggcattgccgttgttttcgcgcccgatgagaaagaactctatccgaacgtggaacagcgttacaacgtcgaaccgcccaatctgcaaaatgagttgtgcggcaaattccgcccggggcattttcgcggtgtggcaacggttgtttctaaattgttccacatcgtttccccggacattgcctgttttggtaagaaggattaccagcagcttgccgtgattaaaggttttgtcgaagatttgaattttgatgttgaaatagtgcctgttgatacagggcgcgcggaagacgggttggcactgtcgagccgcaaccagtatttgagtgcggcggaacgcgacgaagcaccgcgcctgtaccgcgaattaaaggctgttgccgaatccttggtgcagggcagtttggattatgcaggtttggaaaaacgtgccgtccaatccctgacagaatacggctgggtggtcgattatgtcgaaatccgccgcgccgatacgctcgaagtggcgcgggcgggagataagaaactggtggtcttggccgccgcctgtctggggacgacgcgcctgattgacaatttggaaataaaactcccttaaaccgcaagcgtcgggaatgccgtctgaagcggatttgcgtttcagacggcatttattttttgaacggggtttcgcaaatctacaaacgattctgcttgtgataaagttacgcctgattatatgccgtctgaaggttcggacggctgtcggataaaggatgattatgttacctaaccgtttcaaaatgttaactgtgttgacggcaaccttgattgccggacaggtatctgccgccggaggcggtgcgggggatatgaaacagccgaaggaagtcggaaaggttttcagaaagcagcagcgttacagcgaggaagaaatcaaaaacgaacgcgcacggcttgcggcagtgggcgagcgggttaatcagatatttacgttgctgggaggggaaaccgccttgcaaaaggggcaggcgggaacggctctggcaacctatatgctgatgttggaacgcacaaaatcccccgaagtcgccgaacgcgccttggaaatggccgtgtcgctgaacgcgtttgaacaggcggaaatgatttatcagaaatggcggcagattgagcctataccgggtaaggcgcaaaaacgggcggggtggctgcggaacgtgctgagggaaagaggaaatcagcatctggacggactggaagaagtgctggctcaggcggacgaaggacagaaccgcagggtgtttttattgttggcacaagccgccgtgcaacaggacgggttggcgcaaaaagcatcgaaagcggttcgccgcgcggcgttgaaatatgaacatctgcccgaagcggcggttgccgatgtggtgttcagcgtacagggacgcgaaaaggaaaaggcaatcggagctttgcagcgtttggcgaagctcgatacggaaatattgccccccactttaatgacgttgcgtctgactgcacgcaaatatcccgaaatactcgacggctttttcgagcagacagacacccaaaacctttcggccgtctggcaggaaatggaaattatgaatctggtttccctgcacaggctggatgatgcctatgcgcgtttgaacgtgctgttggaacgcaatccgaatgcagacctgtatattcaggcagcgatattggcggcaaaccgaaaagaaggtgcttccgttatcgacggctacgccgaaaaggcatacggcagggggacggaggaacagcggagcagggcggcgctaacggcggcgatgatgtatgccgaccgcagggattacgccaaagtcaggcagtggctgaaaaaagtatccgcgccggaatacctgttcgacaaaggtgtgctggcggctgcggcggctgtcgagttggacggcggcagggcggctttgcggcagatcggcagggtgcggaaacttcccgaacagcaggggcggtattttacggcagacaatttgtccaaaatacagatgctcgccctgtcgaagctgcccgataaacgggaggctttgagggggttggacaagattatcgaaaaaccgcctgccggcagtaatacagagttacaggcagaggcattggtacagcggtcagttgtttacgatcggcttggcaagcggaaaaaaatgatttcagatcttgaaagggcgttcaggcttgcacccgataacgctcagattatgaataatctgggctacagcctgctgaccgattccaaacgtttggacgaaggtttcgccctgcttcagacggcataccaaatcaacccggacgataccgctgtcaacgacagcataggctgggcgtattacctgaaaggcgacgcggaaagcgcgctgccgtatctgcggtattcgtttgaaaacgaccccgagcccgaagttgccgcccatttgggcgaagtgttgtgggcattgggcgaacgcgatcaggcggttgacgtatggacgcaggcggcacaccttacgggagacaagaaaatatggcgggaaacgctcaaacgtcacggcatcgcattgccccaaccttcccgaaaacctcggaaataatgcaggtccatcctttcagacggcataaggtttgccgggaagccggggcattcgggcaaacggcacgcagttcgcacgcgttttgcacggcacgccgaacccatcggccggcaggatggcatccgttaaggaaattctgatgaaacacaccgtatccgcatcggtcatcctgcttttgaccgcttgcgcgcaattacctcaaaataacgaaaacctgtggcagccgtccgaacacatcagcagttttgcagcagaagggcggttggcagtgaaagcggaagggaaaggttcgtatgcaaatttcgattggacataccaaccgcccgtggaaaccatcaatatcaatacccctttgggcagtacgctcgggcagttgtgtcaagacagggacggcgcattggcagtggacggcaaaggaaatgtctatcaggcggaaagtgcggaagaattgagcaggcagctggtcggtttcaaactgccaatccaatatctgcatatctgggcagatggcaggcgtgtggcgggcgcgccttaccgcatcctgccggacggcatattggaacaatacggttggactgtcggcagaaccgccgacagtggggggcaagtccgaacgttgcaactgaataacggaaatttgaacatcaggctggttttcaccgaaatcggtatgccgtctgaaaccgaaaccccggaacgctgtgcggcgcgcacgagataaggcggacagatgaatattgcggacggacggcaggcgttttccgcacctgcaaaactgaatctcgatttgaggattaccggcaggcgggaagacggttatcacaatatcgaaagcatattctgcctgatagatttgcaggataccgtatatttgaaaccgagggacgacggcaaaatcatcctgcacaatccggttgatggcatgccgcaggaagtagatttgagctaccgtgccgcatcgttgctgcaaaaatatgcgcgcaaccccgccggcgtggaaatatggctggacaaaaaaatcccgacaggggcgggtttgggcggcggaagctcggatgcggcaaccgttttgctggtgttgaaccgttggtggcagtgcggtctgacgcagcggcagctcattgattcgggcgcggctctgggggcggacgtaccgttttttattttcggcaaaaatgcgtttgcgcggggtataggcgacaggctggacgaaatggatattccgaaacagtggtatgtcatcgtcaaaccgcccgtccacgtttccactgcaaaaattttcacacacgaaagcttgacacgaaattccgcctcaagcataatgccgactttccaaaatctgcaaccgtttagaaatgatatgcaggcagttgtatttaaagaataccctgaagtttggaaagcctattccgagttgtcccgatatggatttgccttaatgacaggttccggtgcgtgtgtattcacggcgtgtcaagataggaatagcgcatacaatatataccgacaagtttcagatttgtacgaggcatatttggcagagggtctttcaaaacatcctttgttgtccgtataaacattgttggggagtcgtcaagcggttaagacactggattttgattccagcatgcgaaggttcgaatccttcctccccagccaagtcaaacgagttggggagtcgtcaagcggttaagacactggattttgattccagcatgcgaaggttcgaatccttcctccccagccagccctttttggggagtcgtcaagcggttaagacactggattttgattccagcatgcgaaggttcgaatccttcctccccagccaaataaaagcgtgtaagcctgcttacacgcttttatttcatagaaataaaaatattgaaatgcctttgtttgtgtcggatgttgcaggtataatgtcgggcttggtacaagcagagggaagcattgtgttttctgagcggaagttaaacataaaatcaggtgagaatatggctgcgtacgacagtttgatggtatttacaggcaatgccaatcccgaattggcacaacgtgttgtcaggcatttggacatttctttgggcaatgcttccgtatccaagttttcagacggcgaagttgccgtcgaactgttggaaaacgtacgcgggcgcgatgttttcatccttcagccgacctgtgcgccgaccaatgacaacctgatggaaatcctgacgatggcggatgcactgaagcgtgcttcggcaggtcgtattaccacagccattccgtatttcggctatgcgcgccaagaccgccgtccgcgttccgtccgcgttccgatttctgccaaactggtggcaaatatgctgtattcggcagggatcgaccgtgttttgactgtcgatttgcatgccgaccagattcaaggtttcttcgatattccggtggacaatatttatgccaccccgattctgttgaacgacatcaaacaacagcggattgaaaatctgaccgtcgtcagcccggacatcggcggtgtcgtccgcgcccgcgccgtggcaaaatccctgaatgccgacttggcaatcatcgacaaacgccgcccgaaagccaatgtggcggaagtcatgaacatcatcggcgatattcaaggtagaacctgtctgattgtggacgatatgattgacactgcaaatacgctgtgcaaagccgccgtcgccctgaaagagcggggggctgaacgtgttctagcctatgccagccacgccgtattctccggagaggcggtcagccgtatcgcctcatccgaaatcgaccaggtggtcgtaaccgataccattcctttgtctgaagcggctaaaaactgcgaccgtatccgtcaggtaacgattgccggtctgttggccgaaaccgtccgccgcattagcaatgaagaatccgtctcatatcttttcaatgaagaagtgatgacaggcagcatgttgctgccataagcccgaagccgtcttaagctggtcgcggccgatgacggcgattttacctaacttggagtatttaacatgacttatgaaattcaagcctctgttcgtgaagcacaaggcactggtgcgagccgccgcctgcgtcgcgaaggccaaatccccggcattctgtacggtgaaggtcaagagcctgttgcaatcgctgtggatcacaaaaccgtattctacgcattggaaaaagaatctttccatactgcgttgattaagttgtctctgaacggtgaaaccaaagacgttatcgtccgtgatttccaaatgcacccgttccgccgcgaagttcaacacatcgacttccaagctgtgaaagccgatcaacttgtacgcatccgtgttcccctgcacatcgttaacgctgaaaattcccaagcggtcaaactgcaaggcggccgcgtatctctgttaaacacttctgttgaagtagttgctttgcctgccaacatccctgctttcttggatttggattgtgctgaagtggttgccggcgacattctgcacttgtcagacatcaaactgcctgaaggtgtagaaagcgtttccctgaaacgtaacgaaaatctggctgttgctaccgttaccggtaagaaacgctaattgatttcagcagcagggcggcgcgtatgcaatacgtaccgccctgttgttttatgccgtctgaaccgtgtttcagacggcatttctttatttgttggaaaaacgggatatttgaaacggcagattactgccctgtcagacacgcccaaagcctttgccaccggcttcttttttttacattttccagtgcgacgatttctttttcggcaatggtgtatccgttttgtctgattttgatttttcctaaaatttgccctttttttactggggcgggaatcggctgtatggtttctagaatttgttctgccattttcgcttccttatgtggcagagtgatgtaggcttctttgaggaagcctgcgcggacggtttttttgctgcctccggaaatttggatttgggcaacggttttgcctttcggatatattttgggcgtatcgaaggcctgcaatgcccagttcagcagcttgctgttgtctgatgcgcgtgtttccgccgattccgaacccaatgtgatgacaaggatgtgcctgccgttgccggagtatgacacggcaaggttgtagccgccgctttctgtgtgtccggctttcagaccgtttacattgttgtccctatataaaaggatattgcggttgttttgttctatatttttgaatttgaaagatttgatggaaaacagcgggtaatattccggaaagtcgcgcatcaatgcttcagacagcagggcgaggtctttggcggtggaaacctgtccttctctactcaagcctgtcgggtttttgaatacagtgttcttcatgcccaagcgtcgggcttctttgttcatttgttgcacaaaattttcaatcgagccgttgcccagccggccggcaagggttagggcggcatcgtttgcggatagtgcaatcatgccttttaagagtttgtcggtgctgaccgtatcgccgggacgtacaaacattctgcttccttctgaagcccatgcggattcgggtatttttaagttttcttcagattggatattgcccgatttcatgtttttgaaaaccagatatgcggtcatcagttgggttagtgccgccggttcaacaggggtattgatgtttttggcggataaaatctgtttgctttgaaggtcgataacgatgtgtgccgctgtgagggtttcgggtgtttggaacgtgggggcggcgtgtaccgtcggtctgttgggcgcgggcgatgcagccgttgcgtgagaaacgcctaagatgatggaaagcaggacgggcaggattttatgtgctgtcatgaaatattctaattgtgtgcgtgtttcagtctgccgattatacgcttagggtgtctgatcgggcggatttttcttgatttcgcgccgtcttgggcgtatggttttgggttttgcgattttaataaaccgattatcccatattgaattatgaacacgccccttccttattccgattacctcatccgcatcctgacggcatctgtctatgatgtggcggtcgaaacgcctttggaaccggcacgcagcctttctgtacgtttgaaaaacaacatccttttgaaacgcgaagatttgcagccggttttttcgttcaaaatacgcggcgcgtacaacaaaatgtccaagttgccgaaagatgcgctcgcttgcggcgtgattgcggcaagcgcgggcaatcatgctcaaggcgtggcattgtccgcacagcgtttgggctgccgtgccgttatcgttatgccggagactacgccgaaaatcaaagtggatgcggttaaaagccatggcggcgaggtggttttgcggggcgtttcatacaacgatgcctacgattatgcgatggagttggcggaaaaagaagggttaacctatatcgcgccgtttgatgatcctgatgtgattgcgggacaggggacggtggggatggaaattgtcagccagcatcccgatccaatccgcgccgtattcgtaccgataggcggtggcggtttggcggcgggcgtggcggcatttatcaagcaggtccgtcccgaaatcaaagttatcggcgttcagaccaacgattcctgctgtatgaagcagtcggtcgaagcgggtgaaatcgtccatttgaaagatgtcgggctgttttcagacggcactgcggtcaaagtcgtcggaaacgaaaccttccgcctctgcaaagaacttttggatgaaatcattacagtcgataccgatgcggtttgcggcgcggtcaaggatattttcgatgacacgcgcagcattaccgagccggcgggcgcgttggcgttggcgggtctgaaagcctatatcgcccgagaaggcgcggaaaaccaaaccctgattgccgttaccagcggtgcgaatatgaattttcaccgtttgcgccacgtttcggaacggagcgaattgggcgagggcaacgaaggtatttttgccgttaccatccctgaagaacgcggcagcttccttaagtttgtcaatatattgggaaataggaatattaccgagttcaactaccgctacggagacgatgaaaaagcgcatatctttgtcggacttcaagcggcaggcccgcaggatttggcggttatcggcagccggttggatgaggcgggattgcccaatgtcgatttgaccaacaatgagattgccaaaatccatatccgctatatggtcggagggcggacggacaaagtagaaaacgagcgtttggtcagttttgagtttccggagcgtccgggggcattggcacgctttttgaaccatatgcagggagggtggaatattacgcttttccattaccgcaaccacggtgcggattacgggcggattttggtcggtatcgatgtgccgccgcacgatgccgccgcatttgacggtttcttggaaagtctgggatacagctatcacgaggaaacgcaaaatgccgcgtacaagctgtttcttgcctgacgcttgaaagcacaatgccgtctgaaagcctttcagacggcattgcgctttcatggttaaatcgaatattcaatcagttcgttttgagagaagacataaacctgtttcggaatcagcttcaattctttgccttcggcgattgggtaacgcgcggcatcgctgcctgccagcgtgatatgtacgtcctgtttgtcgtgttttaccagaatatgcgtcaatgcgccgacggcgtggattttttcgatttcggcacaaatcatcggtgtttcgtgttcggcggcgatctgccattcgtgcgggcggatatagccggtggcggtttgttcctgccatttgtattgcgcgtccaatttccacgcgaagccgttgtaatgccagaagcctttttcgatgcgtccttcaaaagcgtcggtttcgccgaggaactcggtaacgaaggcattttcgggtttgcggtaaatagcttcggcgctgccggtttgttcgattttgccgtggttcatcacgacgatttcgtcggaaacttcgagggcttcttcttggtcgtgcgtaaccagaatgctggttacacccaggttgtgatggatgtcgcgcagccaggtgcgtaattctttgcgtactttggcatccaacgcgccgaagggttcgtccaaaagcaagagtttgggttcgaccgcaagcgcgcgggcgagggcgatgcgctggcgttgcccgccggagagttggtgcggataggattttgccaaatgagagagctgcacgagcttgagtaattcttcgactttggcgcggatttgtcctttggacgggcgttcggacttgggcaatacggtcaaaccgaaagcgacgttgtcaaacacgttcatatggcggaaaagggcgtagtgttggaacacgaagccgactttgcgctcgcgcacatgtttggcggttacgtcttgcccgtcaaacaggatattgccgccgtcggcgttttccagtccggcgataatgcgtaaaagtgtggttttgccgcagccggacgggccgagcagggaaacgagtttgccggtggggacgttgaggttgatgtttttcagcgcgtgaaaattgccgaagtgtttgtttaagttttggatggtgatactcatattgcattcctttcggcggcggcgagttttttgtcttgtaatttggtaatgatgttctgcaccgccagcgtcgccagtgccaaaagtgccaatacgccggagagggcgaatgcgccggtgaagttgtattcgttgtagaagatttcgaccaaaagcgggacggtgttggtttcgccgcgtatgtgtcccgataccacgctgaccgcgccgaactcgcccatcgcgcgggcgttggtgaggatgatgccgtagagtaacgcccatttgatgttgggcagggtaacgcgccaaaacatctgccagccgcttgcgccgagtatcaatgccgcctgttcttcgctgtcgccctgtgcctgcatcagcgggatgatttcgcgtgcgacaaaggggaaggtaacgaacagcgtcgccaaaacaataccggggatggcgaagataatctgtatgccttgcgcttcgagccagccacccaatgccgtatgcgcgccgaacaataagacgaacatcaaaccggccaccacgggcgatacggaaaacggcaaatcgagcagggtggtcagcaactgcttgccgcgaaaatcaaaacgggtcagcagccacgccatcgccacacccaatacggcattgacgggaacgacaatcagcgcggtaatcagcgtcaatttgatggcagaccacgcttcgggatcgtttaaggatttcaggtacaaatcccaaccgccttttaaggcttcgtaaaacacggcgacgagcggcacgaccagcatcagcagcagaaagcccagcgcggcggcaatcagcaacacgcgcagccggcgcggttcggtcaggttgggattggcggaatagggtttcatggcggtggtgttctctggttggttttaaaatgtttggatgccgtctgaaaaaccgttttttgtggggcggattcgttttcagacaaccttttattgattaagggaataaaaacgtctagctaccgtcattcccgcgcaggcgggaatccaccgcagggcaacaggaaaacagaaaataaataaggcagccgaaattcaccaatggattcccgcctgcgcgggaatgacggtaacaggtatttcagacgacctcaacccttcgcgcccgaacgcctgcccaacgcccactgcatcacgttcagcgcaaacagaatcacaaacgaaaccagcagcataaacaacgccaccgccgacgcgccctgcacgtcgaactgttccagcttgcccgtaataatcagcggcaggatttcagaaaccatcggaatgttgcccgcgataaaaatcaccgaaccgtattcccccgttgcccgcgcaaacatcattcccgcgccggtcaagagtgccggtgtgatttcaggcaagaggacacggcgaaacgtagtccaacggcttgcgcccaaagttgccgccgcttcctcatattcgcccgacaattcttccaataccggctgcacggcgcggacgataaagggcaggctgacgacgaccagcgcaatccaaatgccgacgggtgtaaacgcgattttgatgcccaaaggctcgaaaaaacggcctatccaaccgttgggcgcatacagggttgccaacgcgatacccgtaaccgccgtcggcagcgcaaacggcaaatcgaccagcgcgttcgccagacccttgcccgggaattcataacgcaccaatacccacgccaccagcgtgccgaacacgacattggtcagcatcgcataaaacgacatccgcaagctcagccataccgccgccaacacgttcggctcggcaatcgtgttccaaaagccgccccagccgatttccgccgccttcgccgccatcatcgcaaacggcaagaccacaagcagcgacaggcacaatacggtcagaccaaggctgagtttgaagccgggcagtacgccgggcgttttgagcgctaacataaaacaatgctgaaaataaggaaaaggaaggactactttaacgatgccgtccgaaaaacggaaagaatggaaagtttggtgcaaagacgaatttgttataaagcggttggcagtttctcaagcgggcgcgatgttttaaaatatagtggattaactttaaatcaggacaaggcgacgaagccgcagacagtacaaatagtacggcaaggcgaggcaacgccgtactggtttaaatttaatccactataacaccttgttttgacggaaaaccatcatataaaggaacacttatgcagattttatcttttcaaccggacattgcggaacgtatgctggaaggtacggaaggcgagtcggtcaacgaaaacgcacaattcgtccgtacggacaacggctattggattgcgtggcatgaaggcgtagcggcactgcttgcgcccgatatgccgccgggcattccctgtttttgggtggaaggcgcggaaagccttgaagagttgtgcgtcatggtggaacgcggcgagtttgacgaagtggaagagtttgacggcgatgacgacgaatggctcgaaacggcacagggttgcgggcaccacggcgacgcttgcgcctgcggacattaaaggcattgcaggcttgccgcaaggggggcaaggctttgccgttttttaaataatcggtggattgcatctgtttgcaatgggctgaacgcttccctttgtattttattgaataaaaaaacttatcttggtattataattaaggcagcatcaattattttgggatggcaataaacgcaaagcattgatttgcgccgattgcagacttattatagcaggttgcggcgcggacttaatgggaattgtttatagagcatgatggtctgaaacatcattaattaaaaataccattaatccgatttatatttatttcaatttcaatggaaaaacatcaatgacaatgattttaagcattttaagcctgttttttatcatcagactgttatttttagccgtctctattaaacatgaaaaagccttgattgccaaaggggcgaaacaatacggaaaaaccaattccacgctgcttgcggcagttcatacgctttattatttggcgtgttttgtttgggtatggctttctgacactgcttttaatggcatatccttgattggtacgctgacggtgatggcttcgtttgtgatattgtcattgattattaagcagttgggggagatttggacggttaaaatctatattttaccaaatcatcaaattaatcgttcgtggttgtttaaaacattccgccaccccaattattttttaaacatcatacccgaactgattggcatcgccttattatgtcaagcgtggtatgttttattgattggcctgcccatttatttgctggtcttatttaagcgtatccgacaagaagaacaggcgatggcaacacttttttaacccgtttcatcaattatagcggattaacaaaaaccagtacggcgttgcctcgccttgccgtactggtttttgttaatccgctatattccgccatctctaagatttacagcgatacacgggtaatttaaggaatgcccgaaccgtcattcccgccactttccgtcattcccgcaaaagcgggaatctaggacgcagggttaagaaaacctacatcccgtcattcccgccactttccgtcattcccgcgaaagcgggaatctagaatctcggactttcagataatctttgaatattgctgttgttctaaggtctagattcccgcctgcgcgggaatgacgattcataagtttcccgaaattccaacataatcgaaacctgacagtaaccgtagcaactgaaccgtcattcccacgaaagtgggaatctagaaataaaaagcaacaggcatttatcggaaataactgaaattcaataccgcaaaaatctacccgaaatgatatagcggattaacaaaaatcaggacaaggcggcaaaacgtttggcgacttcgtcccagttgacgatttcccaaaaacctttcaggtagttgggacggctgttgcggtagtcgatgtaataggcgtgttcccacacgtcgcaggtcagcagcggcgtgttttcagtggtcagcggcgtagcggcgttggaagtagaaaccaaatccaatccgccggcaggggtttttaccagccacgcccaaccggagccgaaagtaccggccgcgcaggcattgaacgcttcttggaatttctcgaagctgccccatttcgcgtcgatggcggcggccagttcgccggcaggtttgccttgacctttggacgtgaaacccagccagtagaaggtgtggttccaagtttgtgccgcgttgttgaacacgccgcctgaagattttttcacaatctcttccaaaggcaggttttcaaattcggtgcctttgatttgattgttcaggttggtgatgtaggtttgatggtgtttgccgtagtggaactccaaagtctctttgctcagatgcggggacaatgcgtccagttcataaggcagttgcggcagcttatgttccattttgtactcctgaatattgttttaaatgttgtattttggcagtgttgctgcaaataactcggcagcccgtgtattctacctgttttgcggtgcggaaaccaattaaacctgctttacgctataatagaagattgcaatttcggcacgacagataggatgtaccatgaacgattacgcagccatgccgtctgaagaccgtgaggtcggcgcattgtctctgcccccacactcaatggaggcggaacaatccgttttgggtgggttgatgctggaaaatccggcatgggacaggattgccgatgtggtttccggtgaagacttctaccggcatgaacaccgcctgattttccgatccattgccaaattgattaatgagagccgtcccgccgatgtgattacggttcaggaagatttgcagcggaacgaagaattggaagcggcaggcggattcgaatatctgattacgctggcgcaaaacaccccgtctgccgccaacatccgccgctacgccgaaatcgtgcgcgagcgttccattatgcgccaactcgccgaagtggggacggaaatcgcccgcagcgcatacaatccgcaaggcagggacgcggggcagcttttggacgaggcggaaaacaaagtattccaaatcgccgaaagcaccgccaaatccaagcagggctttttggagatgcccgatttgctgaaagaagtcgtacagcgcatcgatatgctctactcgcgcgacaatcccgatgaagttaccggcgtgccgacggggttcatcgacctcgacaaaaaaacctcgggtctgcaacccggcgacctgattatcgttgccggtcgtccgtctatgggtaagaccgccttttctatcaatatcgccgaacacgttgccgtagaaggcaggctgcccgttgctgttttctcgatggaaatgggcggggcgcaactggtcatgcgtatgctcggctcggtcggacggttggatcaaagcgttttgaaaaccggcaggctcgaagacgaacactggggtcgcctgaacgaagcagtcgtcaaactctccgacgcgcccgtgtacatcgacgagaccccgggtctgaccgcgctcgaactgcgcgcccgtgcccgccgtctcgcccgtcaatttaacaataagcttggattgattgtcatcgactacctgcaactgatggcaggatccggccgttccgacaaccgagcttcggagctgggagagatttcacgttcgctcaaagcgttggcgaaagaattgcaagtccccatcatcgccctgtcgcaattgagccgcacggtcgaatcgcgtaccgacaaacgccccatgatgtccgaccttcgcgagtccggcgcaatcgagcaggatgccgacctgattatgttcatgtaccgcgacgaatactacaaccaggactcacccatgaaaggccttgccgaatgtatcatcggcaaacaccgcaacggtcccgtcggtaaaatcttcctcacatggacgggacaattcaccaaattcgacaatgctgcctatattcccgaggaggcaaagatagaggattaaatggctatataaaaatttattaggcgaaatcaggcaaaatcgtttaaaatcatgctgagagattgccctaaaaaataaaacgcggtcttgaggcatttttgcattcagcccgcatataattgaaaatatagtggattaacaaaaatcaggacaaggcaacgaagccgcagaccgtacaaatagtacggaaccgattcacttggtgcttgagcaccttagagaatcgttctctttgagctaaggcgaggcaacgccgtactggtttgaatttaatccacgatacattaccagttaacgttctattgcttatgtgtacacgaaaacaacaaggtttcacgctaacagagctgctcatcgtgatggtcattgcagccattatggcgatgatagccctccccaatatgagccaatggattgcatcccgccgcattgccagtcacgcggagcggattgccaaccttttgcgtttctccaggggcgaagccgtccggctcaatctccctgtctatatctgtcctgttcaagttaaaaaagacggtacgcccaacaataaatgtgactccggcaagaaggggcagggaatgttggctttcggcgacaaaaacggcaataagggatatgacaatgatacggaggatgttcttctccgcagtgtggtattgaatgatgatatcaatgataagcggattaattatgccttcaaccatatcgctttcggtcagactcagccgaccaccgaccgtgtagtttggacattcaatcaaaacgggacgttcggttatacgaaagaccagcatcttacaaaacaatccagctttttttattctgacggttatatccaaatcgtgttgacagatgcgaaggcggtttctgccgatgaaaagaaattccgttcggcggtggttttgattaacagcagcggcagggtcgaagtttgccctaggggtgatcggcgtactatgtgccagtataaataacagtttcagttttaaaaatgaatatgaagaataatgattgcttccgcctgaaagattcccagtccggtatggcgctgatagaagtcttggttgctatgctcgttctgaccatcggtattttggcactattgtctgtacagttgcggacagtcgcttccgtcagggaggcggagacacaaaccatcgtcagccaaatcacgcaaaacctgatggagggaatgttgatgaatccgaccattgattcggacagcaacaagaaaaactataatctttacatgggaaaccatacactatcagctgtggatggcgattttgcgattgatgccatgaaaactaaggggcaattggcagaggcacaattgaagagatttagttatgagctgaaaaatgccttgccggatgcggcagccatccattacgccgtctgcaaggattcgtcgggtaacgcgccgacattgtccggcaatgctttttcttcaaattgcgacaataaggcaaacggggatactttaattaaagtattgtgggtaaatgattcggcaggggattcggatatttcccgtacgaatcttgaggtgagcggcgacaatatcgtatatacttatcaggcaagggtcggaggtcgggaatgagacgtaaaatgctaaacgtaccaaaaggcagttatgatggtatgaaaggttttaccattattgaatttttggttgcgggcctgctcagtatgattgtcctgatggcggtcggatcgagttacttcacatcccggaaattaaatgatgcggcaaacgagcgtcttgccgcgcaacaggatttgcggaatgcggcaacattgattgtccgcgatgcgagaatggcaggcggcttcggttgtttcaatatgtccgagcatcctgcaactgatgttattcccgatacgacgcaacaaaattctcctttttccttaaaaaggaacggtatagataaacttattcccatagcggaatcttcaaatatcaattatcagaattttttccaggttggtagcgcattgatttttcaatacggaatcgatgatgttaatgcaagcaccgcgactaccgtcgtcagcagctgtgccgcaatatcgaaaccgggcaagcaaatccctactttagaagatgcaaaaaaagaattgaagattccggatcaggataaggagcaaaatggcaatatagcgcgtcaaaggcatgtggtcaatgcctatgcggtcggcaggattgccgatgaggaaggtttgttccgcttccaattggatgataagggcaagtggggtaatcctcagttgctcgtgaaaaaggttagacatatgaaagtgcggtatatctatgtttccggctgtcctgaagatgacgatgccggcaaagaggaaacattcaaatatacggataaattcgacagcgcccaaaatgctgttacgcccgccggggtggaggttttattgagtagcggtactgataccaagattgccgcttcttcagacaatcatatttatgcttaccgtatcgatgcgacaatacgcgggggaaatgtatgcgcaaacagaacactttgacgggaatcccgacttctgacggacagagggggtttgcactgtttatcgtgctgatggtgatgatcgtcgtggcttttttggttgtaactgccgcgcagtcttacaataccgagcagcggatcagtgccaacgaatcagacaggaaattggctttgtctttggccgaggcggctttgcgggaaggcgaacttcaggttttggatttggaatatgatacggacagtaaggttacatttagcgaaaactgtggaaaaggtctgtgtgccgcagtgaatgtgcggacaaataatgataatgaagaggcttttgacaatatcgtggtgcaaggcaagcccaccgttgaggcggtgaagcgttcttgccctgcaaattctaccgacctgtgcattgacaagaaagggatggaatataagaaaggcacgagaagcgtcagcaaaatgccacgttatattatcgaatatttgggcgtgaagaacggagaaaatgtttatcgggttactgccaaggcttggggtaagaatgccaataccgtggtcgtccttcaatcttatgtaagcaataatgatgagtaataaaatggaacaaaaagggtttacattgattgagatgatgatagtcgtcgcgatactcggcattatcagcgtcattgccataccttcttatcaaagttatattgaaaaaggctatcagtcccagctttatacggagatggtcggtatcaacaatatttccaaacagtttattttgaaaaatcccctggacgataatcagaccatcgagaacaaactggaaatatttgtctcaggctataagatgaatccgaaaattgccaaaaaatatagtgtttcggtaaagtttgtcgataaggaaaaatcaagggcatacaggttggtcggcgttccgaaggcggggacgggttatactttgtcggtatggatgaacagcgtgggcgacggatacaaatgccgtgatgccgcttctgcccaagcccatttggagaccttgtcctcagatgtcggctgtgaagccttctctaatcgtaaaaaataaggttgttttgccaataccgtctgaaaatcaatgttcagacggtatttttatgggtatagtggattaacaaaaatcgggacaaggcgacgaagccgcagacagtacagatagtacggaaccgattcacttggtgcttcagcaccttagagaatcgttctctttgagctaaggcgaggcaacgccgtactggtttttgttaatccactatacatcccgtcattcccacgaaagtgggaatctagaaatttaatgttgcggcactagccaaaaaaaccgaaaccgacaggtctagattcccgcctgcgcgggaatgacgaatccatccgtacggaaacctgcaccacgtcattcccacgaacctgcatcccgtcattcccacgaaagtgggaatctagttttttgagtttcagtcatttccgataaattgccttagcattgaatgtctagattcccgcctgcgcgggaatgacgaacctatccgtacggaaacctgcatcccgtcattcccacgaaagtgggaatctagttttttgagtttcagtcatttccgataaattgccttagcattgaatgtctagattcccgcctgcgcgggaatgacggattttaggttggggtcatttattgggaaaagcagaaaccgctccgccgtcattcccacgaaagtgggaatctagaaatttaatgttgcggcactagccaaaaaaaccgaaaccgaacggactagattcccgcctgcgcgggaatgacgaatccatccatacggaaacctgcatcacgtcattcccacgaacctgcatcccgtcattcccacgaaagtgggaatctagttttttgagtttcagtcatttccgataaattgccttagcattgaatgtctagattcccgcctgcgcgggaatgacggattttaggttggggtcatttattgggaaaagcagaaaccgctccgccgtcattcccaggaaagtgggaatctagaaatttaatgttgcggcactagccaaaaaaaccgaaaccgaacggactagattcccgcctgcgcgggaatgacggattttaggttggggtcatttattggaaaaagcagaaaccgctccgccgtcattcccacgaaagtgggaatccagttttttgagtttcagtcattcccgataaattgccttagcattgaatgtctagattcccgcctgcgcgggaatgacgaacctatccgtacggaaacctgcaccgcgtcattcccacgaaagtgggaatccagttttttgagtttcagtcattttcaataaattgccttagtattgaatgtctagattcccgcctgcgcgggaatgacgaatccatccatacggaaacctgcaccacgtcattcccacgaaagtgggaatccagttttttgagtttcagtcattttcaataaattgccttagcattgaatgtctagattcccgcctgcgcgggaatgacggattttagtttggggggcatttattggaaaaagcagaaaccgctccgccgtcattcccacgaaagtgggaatctagttttttgagtttcagtcattcccgataaattgccttagcattgaatgtctagattcccgcctgcgcgggaatgacgattcatatagtggattaacaaaaatcaggacaaggcggcgaagctgcagacagtacagatagtacggaatcgattcacttggtgcttcagcaccttagagaatcgttttctttgagctaaggcgaggcaacgctgtactggtttttgttaatccactataaaaaggcatattgaatgcgggcaaaccggctgctttccgtttttggatttcggagaatgccatcgcccagctttcatcacacataaaaaacagtgcgggcacggcttttttcagcggtattcctttcaggtgcggggcaagcgccgcccccatcaggatatgccgagaattaatcataaaggttacggtggcgataagcagtatcggcagaggttccgcccacaggttgaccgtggcaaactcggagccgccggcgaagttcatactggtcatcaacaacatttccagccagctcatgcctttttgtccgccctgcataccgagtattaatgcccaaggcagcagcccaatcagcataggcgaactttctttgatgccgcgtataaattcgttatgcggggaaggtgtgcataatgttcgtcttcataaccggaagggcgggaattatacactggcaacggatttcaaaacaaaaccgatttgccgtgtttcagcgtaaacacggcttgtgtataatctcccatctttgaaaccggccgtatgcaggagcaagacgatgaatattgaagtagaaatgaaagtattggacgaacggatggcggatgttgtccctgtctatgcaacggagggttctgcaggtttagatttgcgcgcctgtttggatgaggaagtcgttttgcagccgggtgaaacgtttcttgtgccgacgggtttggcaatttatttggcgaatcccgcatatgccgccgttttgctgccccgttccggcttggggcataaacacggcattgttttgggcaatttggtcggtttgattgactccgattatcaaggggaattgaaggtgtcgttatggaacagaagcagcgaaccgtttactgtcaaaccgtttgagcgtatcgcgcagatggttgtcgtgccaatcgtgcaggcgggcttcaaacgtgtcgaggagtttgtcggaagcagccggggtgagggcggcttcggcagtacgggttctcactaaaaatatagaatgccgtctgaaagacacgtcaggttcagacggcatatcttccgatataccgacaaccggagaaaatcatgaataccttactcaaccaactcaaaccatatccctttgcccgactgcgtgaagcgatgcagggcatttccgcgcccgaaggtctggaagccgtccccctgcacattggcgaaccgaaacatccgacaccgaaagtcattacggatgcgctgaccgcctcattgcacgagttggaaaaatatccgctgacggccggtctgcctgaactgcgtcaggcgtgtgcaaactggttaaaacgccgttacgatggcttgacagtggatgcggataatgaaattctgccggttttaggcagtagggaggcgttgttttcttttgttcaaaccgtgttgaaccctgtttcagacggcatcaaacccgcaattgtcagcccgaatcccttttatcagatttacgaaggtgcgacacttttgggcggcggtgaaatccattttgccaattgccccgcgccgtctttcaaccccgattggcgcagtatttccgaagaggtttggaaacgcaccaaactggtgttcgtctgctcgcccaacaaccccagcggcagcgtgctggatttggacggctggaaagaagtttttgatttacaggataaatatggtttcattattgcctcggatgaatgctattccgaaatctatttcgacggcaacaaacctttgggctgcctgcaagccgctgcacagttgggtcgaagcaggcaaaaactgcttatgttcaccagtttgtccaagcgttccaacgttccgggcctgcgttccggttttgtcgccggcgatgccgaactgcttaaaaactttctgctttacagaacctatcacggcagtgcaatgagtattcccgtgcagcgcgcaagcattgccgcttgggatgatgaacagcacgttatcgacaaccgccgtatgtatcaggaaaaatttgagcgcgttattcccattttgcaacaggtatttgacgttaaattaccggatgcctcgttttacatctggttgaaagtccctgatggcgacgatttggcacttgcacgcaatttatggcaaaaagcggctatccaagtattgcccggacgttttttggcgcgggataccgaacagggcaatcccggggaaggttatgtgcgtatcgctttggttgccgatgtcgcaacttgtgtcaaagctgcggaaaccattgtttccctatatcggtaaagaataaaaaaatgccgtctgaacttttgttcagacggcatttttcaatattttacggttgaatttgctataacggtatttatagtggattaacaaaaatcaggacaaggcgacgaagccgaagacagtacagatagtacggcaaggcgaggcaacgctgtactggtttaaatttaatccactatacttcacttttaatcggcttgcccgcaaacacgtttaaacttaaaatccccgtgtttgacacaataccgagcagattatgttttttgtcctttcccctgcgaagaaccttaatgaaaaagaccctgcccctgtcagcgagtttacccaacccgacctgctggcagagtccgacattctaatgcagcagttgcgcgagcttgcgccgcaacagattgccgaactgatgcacgtttccgacaaaattgccctcttaaacgcgcagcgcaatgcagaatggaacacgccgtttacgccggaaaacgccaaacaggcggtctttatgttcaacggcgatgtttacgaaggtatggatgcaaacacattggatattggacagatacgctatctgcaaaaccatgtccgcctgctgtccggtctgtacggtcttcttcgcccgttagacctgatacagccctatcgtttggaaatggggacggcatttgccaatttgcgcggcaagaatttgtatgagttttggggcgacatcattaccaaccttttaaatgatacgcttgcccaagcaggcagcaatacgcttgtcaaccttgcctcacaggaatatttcaagtccgtcaacacgaaaaaacttcgggcgcggctgattaccccaatatttaaagacgaaaaaaacggtaaatataaaatcatcagtttctatgccaagcgcgcgcgtggattaatggtgcgctatgcggcagaacatcatattaccgaccctgaaatgctgaaaaattttaattacgaaggctacgcattcaatgacgcggcttcaaatgaaagcgaatgggtttttatgcgttcggaacaaataaagtgaaaacaataaattaagtattttccgaaaaaagtgcttggcaaaatgtataaatttcattattattcctaatcttcaagaagacggaagcgtggcagagtggtttaatgcaacggtcttgaaaaccgtcgagggttgatagccctccgtgagttcgaatctcaccgcttccgccaatttttgagcgtaaaaccaaataagaatgcaatagccgcaaatattgtatttttatttggttttactgcattatcggaaacgtggcagagaggctgaatgcagcggactcgaaatccgctgagggtgcaaatcctccgtgggttcgaatcccaccgtttccgccacaaaacaaaaccgccctgattcggggcggttcttttttgttcaagttgtatcaattaccatataaaaatcatcggtttgccctatcataacgcatcaaagcaaatcatttgcaatcttgcggcatcttcttattgcatttttttatggtaatgtgtatggtaatttttggataaatgggaaattaccataatggcgaaaatcattacgccgctgtcggcaaatcaggttaaaaatgcgaagccgcgcgataagctgtataagttgtcagacggggcgggctggctttgtgggtctacccgacgggcgggcggagttggaagctgtcgtttgtgcaggatggaaggcagcagacaatttcgctggggcggtatcctgatttttcgctggccgatgcgcgggaatggcgggaggaggtgcgccgaaaacgggcgcacggggaaaatgtcgtcaataagaaggtgcgggcggattttgcttttgagaaggtggcgcgtgattggtttgtgcgttggtcgaaggggcggtctgaaaagtatgccggacaggttatgcggaattttgagcggtgggtttttccggctatcggcaatcttgatattcgtcaaatcaggacggcggatgtggtcggctgtctgcgtgtgatggaggcgcgcggtatcgttgatacgttgcgcaaaacgaaaaacagtctgaagatggtgtttgcgtttgcggtcggttcgggaatgatggaaatcaaccctgtcgcgcaaatcggttcgggtgtgtttgaacgggcgaaaacggggaatatggcagcgttgagtccgtctgaattgccgcgcctgattgattttttggagcagcgcaatgaatttgcggtttatgcgggcagggtgcgtatccatcctgtaacgcggctttgtatctattggctgctgttgacaatgacgcggattcaggaggcggcgttgatggagtggtcggagttggacggggaggtttggcgtatccccgccgaacggaaaaaggagcggcgggggcatgatgtgccgctgtcgcgggcgatgcagtgggtgttggatcaggcgcgggcgttgaatgtgaacgggcggtttgtgtttgaaagtgtgaattttcaagggcatatcaataaggaaagtccgcgcgtggcgatgcagcgggcggggctggatacgacggcgcacggtttgcgctcgcttgcgcgtacttatttgcgcgaggttctgaaggtggatagtattatgcggaaacgcaaataaaaaaccgtttccgcatttttattggaaggcttttttgcaaccgctttacacaaaggcggttttttgtgtaagaactgctataatagcagcccgtcatcgtcaggagcggctaatgcctttaaaattccaaccaagggaacgttcggttatcatgtgcgactttcgcggttatgaagaaccggaaatggtcaagaaacgccctgtcgtcgtcatagcgcgaaacaggcacaacggcaaactggtaacggtcgtacccttaagcagcacagaacctgtccctttggcggactaccaccacaaaatgagtggaaaccccttaccggacaagccgcacatccaatgttgggcaaaatgcgacatgacggcaacagtcggattggcacgattagaccgatacaaacccaaagggcgcgaccgctgcattccaataatcagtgaagaggattttcaggcgattaaaacagccgttgccaaggcattcaaactgtactagaataaaaccgttcccttaaaggggcttgcaagactgttctgaaatatgggcagccgcgcacgggcgacaggcgatgacaagccgtccgtgcgtgtgatggggcgcggaatgcgccccttgtcgtatctgcaaacgcctacaaatccccaatcagcctttcaatcaaggctgttttggacaaacccgcctttgccgcctcctgttccagtttggctatcgttgtgtccgccttaacgggcgatttaagaaccgctttacacgaaggcggtttttttgtatagtccggttcacgaggtacagaatcttgaaaatagtcaagcaatgccgtatattccgacgcaaggatttattttcaacatcagcttaaggggatgacaatgggacatatttattcggaaagccgtgatttccgcctttcagacggctgggacggcaatgactgacaacctaatacagatagcaacgccgatattgactgttatcggcgtttttgttgccgcttacggcatcatgaggaatacagaaaacgccaaaaagcgcgctgatcatggccgaacgtaacaatgccgcccttcaagaagccataaccatagtaaacgggctggcaaaaacagacggatgcatactcgccacctatacatcggataccccggacaagaagaaagaccgtgaagccatactgacagttttaaaccagcgcgaatttgtctgtgcgggcgtattaggcggagcactgcacgagaaaatgtataaagatttcgaatactccatgctgttacgtgactgggacaacctaagcagctttatttttgaaatacgccgtatcaggagcgcaccgacggcctttcaagaatttgaagccgtagcccgaaaatggaagaaaaagcctctgaaaaccaaatagcttaatagcttaacatccgccgcaacataggccgtctgaaattcagacggcctttcagtttgccgcctacggttttttgggaaaccccttgcatgtgcagggggttttgttttatattcctgttcgtggcgtcagaaaccacactacagcggcaatcactccgtcaatgtgattttttcatgtctatagttttctttccttgttgtttgtttcgatagcaggaagtttctatgaccgcgtgggcgacgaatacaagacccgaaaggggaataagtccgccctcctatgtgggttcttaaccgcgtgtccgcccatttgggctaattctcttgacacatttccataactctatataatatttcccacggtgcttgaaaacacctgacaaacagcgtatatccaacacgatagagtggaattttttacgtctatacgtatcaaatcgatttactcctatgtgggggtgcgcctacccgtaaggctggcggcgcgcctgtttgcgtgttttcaacacccctgcgcccaatttgggcattcctaaatcctacatgctgttgaagaccgcgaccctatccgccacatggcggcttttttatgcttgcagaaaatagaaagattggatatattacgaaacacgaggcgtcgaaaacctctactagaacggcatttaccccgtcagcgtgaattttttacgtccataagttttcttgtttggttgtttgtttcgatatatccgaactagtttcctatggtcgggagggtgcggaatacaatacccgcaaggggaataacgccggccttttctagtaggttttcgaacctcccgaccacccatttgggtctttcgaaactaaactaggaaactatcatgaacgtatctgttctcaattttggtaacacccctgtatctttccgtcaagacggttttttaaatgcaaccgccattgcatctcactttggcaagttacctaaagactacctaaaaagtgaacaaactcaacaatatatctctgcacttgctgagaatttaagcgttaggagaaaaatcctaacggaagcaaatcaaatagttatcgtgaagcgtggtggcagtgagcaaggcacatggctgcatcccaaactcgctattcactttgcccgttggcttaatccgaaatttgcggtttggtgcgatgagcagattgaaattttacttaacggcaaaatttcagacggcataaaaacagttacccccaaacccacccgcgcccttccggacggcttgaccggcgaacaaatcgaagccgtcaaaaaactgcacaacgccctgaccaaatccgcacccaaagaagcgcaggcgcgtatcgccattaccctttggtctgccgtcaaaagcaagttcggatgcagctacaaagaagtacctgccgaacagttccccgaagttttaagcgtgatgggccgcgtggcagttgaaaacggcgtgctgtacggcgaagtcctcgaccgcgaaccattgcccgcaccgcaacctgccctgcccatcagcggcaacgccctgtacgacctcgccgttgccgtcagatacggcgcgtgggccatccaaatgggcagagacgtttccctgccgctgaagcagctcggctgcaaacaggcggtaacgatgtggacggtctgggcggaaacacgcagccgcctcaaagccgccgcaaacgccctcgaagccttaaacgcacacgccgacgcggaacacgcggcaaaaatccgcccgatgctgcccgaaatccgcaacctgtcgtcggtttgatgcagtagggaatacaaaagccgtctgaatgtgaaaacgccctaatcgggcgtttttttattgctgtaaccccagggcttccaaaacttcgcgggtgtcccatacgggggatgtgagtggggttttcagacggcacggtatccgtccgtctttttccatacgcagcagtgtcgagtttgaaatggggcggttgcggcaggttgcgtaggcaatcagttcgcggatggtcgggcggtctatccttgcgcccagttcgttgatgttcatttttttactctcctgtaatgactcggtttctggaagcggcgtaatacggcatcggcggccgtgatgaaaagccataccgccaatgcctcagcgccggaaaatgacagcgcgatgatgatttttaatagggtgtccatcaggctttccttttttctctagtttcgtactcataaatgaacatcgggaacgcctgcccgcttctgacaagatttaaatccggtatctgatcggtaatcagacaagaaaaccgcccgtccccgccgtttcccgtcgaacagcaaatcacaaggttgccgccaaatggaatcgtatcttgattcgtgttcatctttactgctccggcaaatacgttttaaaaatcaaatcttcaagtcggcggtaaaccttcccggtctgcaccaatgactcggtttcgggaagcgcggccaaaagcttccgcatatgaccggcaatcgcctgtaacacaagctgctcgccgcgcgttttgttgtgtttggcaaccatcgccgccagcccgtaaaccgccaagtccatcattgcctccacgctgtcggcttcagcggaatgcaagagattaatctctatgtcattcttgatgttctcgttttcttcctgaaagttcatttttccagctccggcacttccgcgtcgccgtgtatccatcggtagtctttcaattcttcggcttcgcgttgtctgatttcggcgtcgatttgggcgttcaacccgtcaatctctgcctgtttgtcggcgacggctaagcgcatagcggtcaggctgttttcagccttgacttgcactgcggcttcggattgcggttggcaggcgtagatgccggcggctgcgactgcgagtaaggcggtgcggatcaagtatttcattttgattcctcattattggggtaacggcttaatatcaggcagcgtttttgaggttgtcttttgtcagacagatgagcgcctttctgacggcggcaaagggggttttgtactctggctctatgccgacaagtagctccccgtctgtgttgatgatgtcgcatccgtagcgttcggtggggtagccgtagtcgtttttcccctgttctgaggttactcggatgtcgatggagtattcttctgtgatggtcattttggggtctttcggatttgggtttttgtggaggtcgtctgaaggttcacgatttcagacgacttttttttaggcgattacgccgaaatagatgtcgatttcagggaaggctttttgtacggcttcggaaatgtcttttgccgcttgttcgattacagcatcgatttgctgcaattcgtaccacaggacgagtgcgccgctgtttttgtcgatgcggaatttcaacagggcttcaacaaagtaggatgcaccgccttgatgcggggtgaactcgatgccgaaacgttcaaacattttgaggtttttctctgtttgccctgagtcttcggattggaaggtaaagttgattctgccgtcctgttcacgatagccttgtttgaaggtggttttttcggtgtactcgagattgagcgcgaaatccaatacttcggcggcggtcgggtaaacggaattttcgttaccgggatttttggatacgatgttgcgggcattgttggtcaggaaatgggaaaactccatctgattcatgcggtgcgcattgttgttcagccagttggatgccgatgtagtgtgttgcggggtgtatacggcataaaaatcgagccagcccggagcttgttgcgtatggccattgatgacggcggtgacatcaatacgccctgatttgaaatcggcatcaatgtagatttgtgtgccgtcctgtttgtgtttttgtacaaacttaataagactggcggtatcgtgcatgaggaatttgccgcacttgcggtacgggttttgcatcaattcggggtgtgatttgtatctccagccaccgtcttggtctggtgtgaatacaagcggagtattgttcggtgcaaactcaaaaaaaggtttttgagctgcttgtaaggcggttttaatcatgttttcttgggtttccattttagatttccttttgtgtttgagttagttggatctgaccattttcaacgtgcttgacgtattggaaacttgtttgagtttcaattttccttgtgccggatcgtcggcttggatgttgccgtcaggtgtagcaaagacgatgccgccttcgcgtttttctttgggcagtttggttgctacatcgtggctgatttttaccgttccgctttggatgttttggggttggattttgagcttgacagtaatttctgactgtttaccgtgagcaaggcaggcacgcaccgcttcactcatggcttcgcctaattcacggtctaaccagccgctatttacggtcggtatttgcttggaggcaggaacaaatttcttttcttgggtttccatttttgattttcctttaaagagaggttagttaggttgccggtatcacgggatgacaataccgaggaggttatttaattttgagaatttccaaagattccacggtggagcgggctattccaaactcgttaagtgcggcaaagccggctgctggtatggtggatgctccgtaatttatttttggaataaaattttcgttcagggcgacggcggttcttgcgagatttagcaaagcgtcgaaattttctttagggatggtgatggtttccatgtcggtactccatgtggctgttgtttgtttcgatgggtgtatttaaacatagcgtttaataatatgcaacaatctgtttaagatttttgtttaaggtttataaacattttgattattaaaagaatttatttttgagatttcgcaggcgcaaaaaaaccgcctattaaggcggctttgtcggttttgtgttgttttcaggttcggcggggcatgaaaaaagcccgcataatgcgggcgggttgtttaatctgtggggtcgtatgccacatcaactatcagcttcgttttccttaggtgttggttgatagcataaatttcgtgccatgccttgcttagataatactgccgaagcatcgggattttagatagccggtgtggcattgggatatttcgtgcgcaccatagccgcaacagagtgtcttcgtcatcgatttggatatgttttaagattaagccgcttgaaccgacgggcaatagataccttgcgtcagggttggcaaaatgcttaccggaaccatcaaagtcatacaatacatttggcttgaggtctttgtagttctcttttctgcgcggcgcagatacttcgccaagccactcaaagcacagggttgctgttctgtgatgcagctcgtgaaccttcaactctccttgtacgccaaggaaattcataccggcatcgtactcaccaggccaccaaggggaatcaaaacgcctatttttgacaatcttgaaagccctatcaatattatctcgtcgtaatagcaacatttttcaatccagcacgctccaccaaaataccctgccgataacggtcaggctgtccaagggggcgttttcgtcgccatagaaaccgctgttgtggctgcgtatcagaacgctgttgccaggctgccgtatcaggtacttcacgcggaacataccgtcctgggcgaaggcgtagattttgccgtcgcgtatggcggtttcgcccgtatctacggcaattgccgcgtcttctgcgattttttcctccatactgtcgccggtcagggtgcagcaaaacacgttgtcgggattgatgcctttgcgtttaagcgtggatttgccgaacggcaggcggtagccgttgtaatcggggatttcatacgtgcctactccgcctttgaagcagctctctttgaggtaggggacgaaaacataatcatcgtcgggcagcgggtcgttgctgctccacgtcatcgggcggtggatgtctttgacttcgtggggtaggtcggggtcaataaggacgggcgcggttcggctgccttcacctgttctcagccatgtttcagatacaccgaatgcttttgctacttcaggcagcgcctttgccgctatgccacgactttcccagtttttcaaagcctgttggctgatattcagacgctctgctatgtcagccggctttaaaactccctgctctttggctatctcaaaaagtctgtcagttgtctcgtgcattgtcatttttaatcttattcgcggttggcttaattattctcccatatttaaacaaaatgttgttacacaagacttgatttttatctaaacatagtgtttaatattagcattagatttaaacatttggtttatttatggataaaagagtcaatgaagacaaacgcctgttgcaatcaatcggcagttacgcggaagttggtcgaataacagggaatagccctcaatgcgttttcaattggacgaagcgcgggatacctgcacgaataaaacttaagtatcccgacctgtttttgaactcaaagaaaccagacgaccaacccaaataaaaaaagcctgtcgtggaaagctcgccgcgggctggggaagccgcattgatgacgataatttttaatattgcttggattcggatttcaagtgcaacactagtgtattagtggttggaacagattcaagaataaaacacttggcgtttcgtagccaagtgtttttcttggtcggtggttcaactcatcttgaaccctgcgtatctcccgatcactgatgttacggaaatcggtttgtttggggaagtattgccggatgagtccgttggtgttctcattcagccctttctcccaagaatggtaagggcgacaaaaataagtctccgctttcaatgctttggttattttggtgtgttggtagaactctttgccgttatccatggtgatggtgtgcaccctgtctttatgtgcctttaatgtcctaacagctgcccgggcagtgtcttcggctttgaggctatccaatttgcagatgatggtgtagcgggtaacgcgttcgaccaaggtcaataatgcgcttttctgtcctttgccgacaatggtgtcggcttcccaatcgccgatacgggatttctggtcgacgatagcgggtcggttttctatgccgacacggttgggtactttgcctctggtccatgtgctgccgtagcgtttgcggtagggtttgctgcatattctgagatgttgccacaacgtgctgccgttgcttttgtcttggcgaaggtagcggtaaatggtgctgtggtggagcgtgatctggtggtgtttgcgcaggtaggcgcatacttgttcgggactgagtttgcggcggataagggggtcgatgtgctgaatcagctgcgaatcgagcttatagggttgtcgcttacgctgtttgatagtctggctttgccgctgggctttttcggcgctgtattgctgcccttgggtgcggtgccgtctgatttcgcggctgatggtgcttttgtggcggttaagctgtttggcgatttcggtgacggtgcagtggcgggacaggtattggatgtggtatcgttcgccttgggtcagttgcgtgtggctcatggcaatctttcttgcaggaaaggccgtatgctaccgcatactggcctttttctgttagggaaagttgcacttcaaatgcgaatccgccgtgcgctgaaattcgaccagttgatactcgaatttcctgagcgcggggacggcgcatgggtacacatcggtttccgacgcaacagcccgcaacgcaaccagatactgaccgcaaccaagaaaaacggcaaaaccgtgtatctgcccgggctgcatccttgaggtcgtctgaaatggatattttattgaaatactggaagccggtaggtgtattgctgctaatcgtcctgatttttaccgcatggcatttcgaccgtgccgaaaaataccgcatgggacgggaggctgctgctgccgaaatctcgaatcgtctgaaagacggctatatcgagcaggcaaagcaggcgcgttctgccgagcagaaggccgctgccgcgtttgccgaacgacaaaccaaattagaagaggaaaaacaaaatgctgaaaaaactgttgccgctatgcgtcttgagcttaaccgcctgcgccactacgccgccgcccaaaatcgcaacagaaacctgcccgcaaccgctaccgccgccaccgcatctgatggcgcgtcagattcccaaggctggctattattcggacagtgcgctgaaaaatatgcaggactggcagaaacagccgacggacatgcagccgatttaagggaatggcaggcatatggtcatgcagtaagcagtcagcgtgccgaataagcaaccgcccgaacctgtaagaaaagattacaggttcgggcggtttcagcatttaatcgaataagacggcgccgatgcgcgccagcacatcgtccaatacataatcgggtacagtttctttaaaagaagccttgcggatttgccagtctagagatttgagctggtggcagtggacattgccctgcgtttccgttcctgcaccgagtaaggttgaaatcatgccgctgcttcgtgcagctgctgcattcccctgtgaaatggggcaggcaaaaaccaatcccgttgcgcggttgaatgcttttggagacagagccagcgcaaaccgcccgcccttgatttccttgccgctggaagggtcgaaattcaaatggaaaatatcgcctttgtcgggaatatacatttcagacgacctcgttgccggcatcatccaagatttcccagccttctacgcgcggcggggtttcttccatttcggcaagcaagtctgccaagcggaaacgtcgggcagcacgcacacggagttcgccgttatgtacttccgctaccaaagcgtcgccgattttaaaatccaattgtttcagcatgtcggcaggcagtcggacggccgccgagttcccccatttttggacacgcaacataatcttcacctttattgtatctacaaagtagatacatattaccataaaatttcagttgttcaaatacttgtgcagaatacgccaaaagccgtccgaactgtttcggacggcttttgtactgtatttgcgccttcaggcaatattttgttatccattttcaagatgcaaaagctttctaattgcttgatgtcggatttcggttgtttagggatacaaaaccaagtaaactaaaactgtttgattggaaaatgctccgcaaggagaaaattatgttcaaaaaatcactttataaggctgctttggcgtatttcggcgattgcgtggctgcccatatttcagaacagttttgactgtttattcacaaatcagatgcctttagggggtttgctttccataatgcaaccaaaatttccaactctctaaatattgtgtctttgcgttcttcttcgcgtattttcataacaagaggcgaaactgcattccacaattttatgaagttggtgcaatgcagccgtttaaacaaatcctcatccaatactcccgagttgattgcgcacgcataaaactcgtgccgattgattacggtaagtaaatgccctctctctttttcccattgtccgcccttattttgataaatttcatacaggtcgatccgcgcgttgttgtcgtcaactgccgtgccgcgaatataaggcgaaatatgattgtcggcttctacaaattgtgcatcttggtaatcattcaaaataacatctaatgtcgccttttgctttgaagttttcttattgatgaatattgtccccagtgcaatgacggcggttactgaaacaacggtcagttgccaaaacatcagccattcggccgtccctcataggttaaactgtacgctgtgcctgaatatgtaaaataaagtgaatacagatacaaacaaggaggttagggcaattactgacaaccaacctccttgttttatttgtttccgcaccttaccagccattaaaaccctcatttttgtatttcatcgtatttccttaatggttttaaccttgcttgtcgatatctgtatattaatgccgtgcgcccgttctttcaaggggtgatttaaaaatcaggcatccttgacatcctctcctgcttaaaggcggggggactcctgccgtgtaaaccaatgccgtctgaagggctttcagacggcataaaaaaaccgcctttgtgtaaagcggttgaagaaaagcctttcaataaaaatgccgtctgaatttcagacggcattgttgtcggatatgcctattccttatccagccggcgcagggtttcggcgagctgtttgaagtcggtttctcccgccgccaaactgacaatcaagtcgtcaagcccttggtcggcggcaatgctgatgccctgcaaatccagataggtcaacattgttaaaagcgcggtgcgcttgttgccgtcgggaaaggcgtgggctttggctatggcttgtgcatagagggcggcgatttcgtagatgtcctcaaggttttcatactgccgccagttggcaatccgcgacaatgcgccgtccaagcgcgccatatccgcccgccctttcaaacccgcttcatccgccaatacggtttgatggataagcgcgaccagttcgccgtctatcatttgtcggcaagtgccttgacggctttttgatgggttttggcaatgcggcgggcggcggcaagcagtacgcgtttgcctgcttcgcctttaagctcgattttgacggggcgtgtattttggttttgcatcgctgctccttgtctgtttgcgggcattttagcttttttccggcagcttgggaaatgccgtccgaaaacacttcagacggcattcttctaatagtgtaatgcaatagttactccaagatttttgtatatggctgtttttatggtaaattaaattttcataagaaataaatatatttaaatcaatgaaataaaatttagtcgaatcccaccgtttccgccacaaagcaaaaccgccctgattcggggcggttcttttttgttcaagttgagacctttgcaaaattcctttccctcccgacagccgaaacccaaacacaggttttcagctgttttcgccccaaatacctcctaattttacccaaatacccccttaatcctccccggatacccgataatcaggcatccgggctgccttttaggcggcagcgggcgcaaatcagtccgaaataggccgcccgggcgtagcggaatttacggtgcagcgtaccgaagctttgttcgaccacataacgggtcttagataaataccggttgcgtttggtttgcgtttccgtcagcggacggttgcggcaggctttgcgcataatgccgtcctgcaactgatgttcttccagatgttgccggttttccgcactgtcgtagcctttgtcggcatagatggtcgtaccttcgggtaacccttccaacaacggcgacaggtgtttgcactcatgggcattggcgggagtaatgtgcagtttctcgatatagccttccgcatcggtacgtgtatgttgtttgtaaccgagtttgtagaggctgtttttctttgtccaacgggcatttttgtccttactcagtgtggtttgaccgctgacttgtccctcttcatcgacttctatggcctggcgctgtttgctgccgacggtctgaataatggtggcgtcaacgacggcggcggatgctttctctacttttaagcctttttcggtcagttggcggttaatcagttccaacagttcggacagggtgtcgtcttgcgccagccggttgcggtagcggcataaggtgctgtaatcggggatgctcagttcgtcaaaacggcaaaacaggttgaagtcgatgcgggtgatgaggctgtgttcgagttcgggatcggagaggttgtgccattgtccgagcaggacggctttgaacatggacaacaggggacaggcgggacgaccgcggtggtctcggaggtaacgggttttttgacggttcaggtattgttcgatcggctgccaatcaatcacctggtccaacttcaatagcgggaagcggtcgatgtgtttggcaatcatggcttgggcggtttgttgaaagaaggtgctcatgagaaatcccctaaatgtcttggtgggaatttaggggattttggggaattttgcaaaggtctcgaccttgtgttttttaaggtattcgatagtatgggcgatacctttggggttgttggtttcggttttggttttagacaaagacgaaacggcgatgacgaagtttcgtttggcgatgtcgatatagtgaattaacaaaaatcaggacaagacgacgaagccgcagaaagtacagatagtacggaaccgattcacttggtgcttcagcaccttagagaatcgttctcttcgaactaaggcgagacaacgccgtaccggtttttgttcatccactataacagcaaccctgtcgccgtcattcccgcaaaagagggaatccagtccgttcagtttcggtcatttccgataaattcctgttgcttttcatttctagattcccgcttttgcgggaatgatgacggaagggttttggttttttccgataaattcttgaggcattgaaattccagattcccgcctgcgcgggaatgacgattcataagtttcccgaaattccaacataaccgaaacctgacagtaaccgtagcaactgaaccgtcattcccacgaaagtgggaatctagaatctcagactttcagataatctttgaatattgccgctgccttaaggtctggattcccgcctgcgcgggaatgacgaatccatccgcacggaaacctgcaccacgtcattcctacgaacctacatcctgtcattcccacaaggacagaaaaccaaaatcagaaacctaaaattcgtcattcccgcgaaagtgtgaatctagaaatgaaaagcaacaggcatttatcgaaaataactgaaaccgaacagactagattcccgcctgcgcgggaatgacggctgcagatgcccaacggtctttatagtggattaacaaaaatcaggacaaggcgacgaagccgcagacagtacagatagtacggaaccgattcacttggtgcttcagcaccttagagaatcgttctctttgagctaaggcgaggcaacgccgtactggttttttatatccaatgggtgcggcgtttaatcataatcaggcagatagggataactaatgccgtctgaacgacgaatgttcagacggcatttttacctttgtgcttataaggcgtttagtgcctgattaaaggttacgctcggacgcatcacttgtgcggctttttcaggattggcggcgtagtagccgccgatgtcggccgctttgccttgtacggcggaaagctcggcaacgattttcgcttcgtcggcggtcaaagcggctgccaatggcgtaaatgcggctttcagttcggcatctttgtcttgcgccgccaattcttgcgcccagtagagggtgaggtagaaatggctgccgcggttgtcgagttcgccggctttacgtttaggcgatttgtcgttcaacagcagtttttcggtggctgcatccaaagtgtcggcgaggacttgggctttggcattgccggttttttgcgccaaatgttcaaacgatacggcgagtgcgaggaattcgcccagcgagtcccagcgcaaatggttttcttcgaggaattgttgaacatgtttcggtgcagaaccgcccgcgccggtttcaaacataccgccgccgttcatcaatggaacgatagacagcattttcgcgcttgtgccgagttccaaaattgggaacaagtcggtcaggtagtcgcgcaagacattaccggttacggagatggtgtcttcgccgtttttcagacgacccaagctgaacttggcggcttcttcaggagcgaggacgcggatgtcgaggccattggtatccagttcggcaaggtaggctttaaccttggcgagcaggctcttgtcgtgcggacggttttcgtcgagccagaacacggcaggcgtgttgctcagacgggcgcggttgacggcaagttgtacccagtctttaaccggagcgtctttggtttggcacatacgccagatgtcgccggcttcaacgtcgtgctgcattaggacttttcctgccgcatcaatgacttggacttggccgtcggcttcgatttcaaaggttttgttgtgcgagccgtattcttccgccgcttgcgccatcagtccgacgttgggcacagtacccatggttgtcgggtcaaatgcgccgtgttcgcggcagaagtcgatggttgcttggtaaacgccggcatagctgctgtcgggaatcacggctttggtgtcttgcgctttgccgtttttgtcccacatacggccggaattgcgaatcatcgcaggcatagaggcatcgacgatgacatcgctgggaacgtgcaggttggtgatgcctttgtcggaatcaaccatcgccaaatcggggttggcagcgtaaacggcggcgatttcggcttcgacggcggtgcgggtgtccgcatccagtttgtccagattggcaagcaggttgccgaagccgttgttaacgttgacgccggcagcagccagtttgtcgccgaatttttcaaaaacaggcgcgaagaatactttgacggcgtgtccgaagataatcgggtcggacactttcatcatagtggctttcatgtgcagcgagaacaacacgccttttgctttcgcatcttttacttgttcggcaaggaaggcgagcagggcttttttactcatcacggtcgcgtcgatgatttcgccggctttcagggcgacgggctcgcgcagctcttttttgttgccttgtttgtcggtgaatacgatggatacggaagtcgcttcaggtacgataacagattgttcgttatgaaaaaagtcgccgctttgcatggtggcaacgtgggttttggagtctttggtccatgcgcccatgctgtgcggattttttttcgcaaagtttttcactgctttaggggcgcgacggtcggagttgccttcacgcaggacagggtttaccgcgctgcctttgatgcggtcgtagcgttcgcgtacggctttttcttcatcggtttgcgggtcggcgggatagtcgggaacggcaaagcctttagattgcaattctttaatcgcggcagtcagttgcggtacggacgcgctgatgttcggcagtttgattacgtttgcatcgggttgtttcaccagttcgcccaattcggcaagcgcatcaggtacgcgttgcgcttcggtcaggtattcgggaaacgccgccaaaatacggccggagagagaaatgtcgctggttttgacatcaatatcggcgtggcgggcaaaagcctgcacaatcggcagcagcgattgggtcgccagcgcgggtgcttcgtcggtatgggtataaacaatggtggatttttgagtcataggattattctcttgtaggttggttttttcttttggaacacattgcgcggggaatgtgcgtggctattatggcatattttggcggctttgttcgcgctttgttcgatcttggcgtgtttgaacgcggcggcgtgaaaggaagggggaaatggttttcccgcgtttggcggcggtcggaggtgctgtgcctgatgtgcggcggcatattttcggtgaaattgattttatagtggtttaaatttaaaccagtacagcgttgcctcgccttgtcgtactgcttgtactgtctgcggcttcgtcgccttgtcctgatttaaatttaaaccactataatattcggtaactgtcggaatatctgctaaaattccgcatttttccgtcccgggacactcggggcgtatgttcaatttgtcggaatggagttttagggatatgggcttgaaaaaggcttgtttgaccgtgttgtgtttgattgttttttgtttcgggatattttatacatttgaccgggtaaatcagggggaaaggaatgcggtttccctgctgaaggagaaacttttcaatgaagagggggaaccggtcaatctgattttctgttataccatattgcagatgaaggtggcggaaaggattatggcgcagcatccgggcgagcggttttatgtggtgctgatgtctgaaaacaggaatgaaaaatacgattattatttcaatcagataaaggataaggcggagcgggcgtactttttccacctgccctacggtttgaacaaatcgtttaatttcattccgacgatggcggagctgaaggtaaagtcgatgctgctgccgaaagtcaagcggatttatttggcaagtttggaaaaagtcagcattgccgcctttttgagcacttacccggatgcggaaatcaaaacctttgacgacgggacaggcaatttaattcaaagcagcagctatttgggcgatgagttttctgtaaacgggacgatcaagcggaattttgcccggatgatgatcggagattggagcatcgccaaaacccgcaatgcttccgacgagcattacacgatattcaagggtttgaaaaacattatggacgacggccgccgcaagatgacttacctgccgctgttcgatgcgtccgaactgaagacgggggacgaaacgggcggcacggtgcggatacttttgggttcgcccgacaaagagatgaaggaaatttcggaaaaggcggcaaaaaacttcaaaatacaatatgtcgcgccgcatccccgccaaacctacgggctttccggcgtaaccacattaaattcgccctatgtcatcgaagactatattttgcgcgagattaagaaaaacccgcatacgaggtatgaaatttatacctttttcagcggcgcggcgttgacgatgaaggattttcccaatgtgcacgtttacgcattgaaaccggcttcccttccggaagattattggctcaagccggtgtatgccctgtttacccaatccggcatcccgattttgacatttgacgataaaaattaatcgcatagcaaatcaaaatagaaaatggcggagtgcgtggggtaaaaataaggatagcgttttttcatttggattgacgataatttctgattgctttgcgtgtgctgaaatggcaaagaaaatgccgtctgaagtcttcagacggcattgttttgttttggatgttattcgggcgcgcggaaactgtcgtggcaggatttgcagcttgcgccggtttcgccgtaggcggctttgatttcgtccagtttgccggtttgggcggcggcgttgagtttttcgacggcggcggcgaattttgttttttcggcttcaaattttgcaccatccgaccaaacggcgggcagtgcgcggccgttgccttgcggatcggactcaaaaagtgtgaacggtttcttgctgctttcggcaaacgacgctgccgcctgtttgaatttttcgacatcgtaaggttcttcgtctttgaccattttgcccatgcgtgtgaattcgggcatcatggatttgaacgcggcggtgcggttttcggaaatttcgcctttgggttgggaaggtattccgctgcctccgcaggcggaaaggagcagtgtgatggcggcagcagcaaggctgatttgggttttcatattgaatgtgtcctgtcgtggtggtatggttgttgtcattttcagtcggcgcgatgccgtctgaagggtgttatgatacctgaaacaggtttgggaaacgagaaagaaaggaaaaacaatggctgttttaattaccggtgcttcggcaggattcggcgaagcgatgtgccgtgcgtttgtcggggcgggataccgcgttatcggtgcggcgcgccgtgcggacaggcttcaggccttggcggatgaattgggtgctttgttttaccctttggaaatggacgtgtcgcgacgcgagtcggtggaaaacgccttaaacggcatccccgatgaattttccgacatcgactgcctcatcaacaatgccgggctggctttgggtctggacacggcggacaaggcggattttgaagattgggaaacgatgattcaaaccaatgttttgggtttgacgttcctgacgcgcaaaattttgccgcaaatggtggaacgcggcggcggttatgtgatgaatttgggttcgattgcaggcaattatgcttatgccggcagcaacgtttacggggcgaccaaggcgtttgtgcgccagttcagcctgaatttgcgcgcggagttggcggataagaacatccgcgttaccaatatcgagccgggtttgtgcggcaatacggagttttccaatgtgcgcttcaaaggcgatgacgagagggcggcgggcgtgtatgagggtgtggaatttatccgccccgaagatattgcggaaaccgcattgtggctgtaccagcggccggcgcatatgaatgtgaacacgattgaaattatgcccgtggcgcagacttttgcaggaatgaaagtgataaaaaaagccgtgcccgaagtgcgggaagactttgaaaaacagagtatgtcgctgttttcccgcatcaggtcctggttcaaatgatgcaaaatgccgtctgaagacagtttcagacggcatttttacgggtatttttacggagtaggcaataagcccgccaatttggggttgccttctttcggaatcgggcgcggattgccttccgcatcgatggcaacataagtgaacacggcttcggttacgaggtagcggtcttcggtaacgcaatcgttcatcaaagttttcacccagacgtcgactttaagctggagggaagtgttgcccacgcggacgcaatgcccgtagcagcagacgacgttgccgaccttgaccgggcggatgaagttcatttcctgaacggcgacggtaacgatgcgtccccgcgcgatttccgccgccaatatgccgccgcccaaatccatctgcgacataatccagccgccgaaaatgtcttggttgggattggtatcgcgcggcatagcgacggtacgcaggagcagttcgccttgagggcgttggcggttgccttcttcgtgctgcataaagtttccttgttttattgaaatataaatcgaacctgcacccctgcccgaaacgggaagtcgggaagtgtgtagtttaacccatttgagacatacaagggcgggcgcggaacagattcgcaaggcgtattgtagggcggggctgtagagtgggcttcagtccgccaatcccgccaaatcctaccctaagcaactgaaccgtcattcccacgaaagtgggaatctagaacgcggggtttcagtcatttccgatagattcccgccgcgtcgggggtctggattcccgcctgcgcgggaatgacgaatccatccatacggaaacctgcaccacgtcattcccacggaagtgggaatctagaatctcggggtttcagtcatttccgatagattcccgccgcgtcggaggtctggattcccgcctgcgcgggaatgacgggttttaagattacggtgttgtcggacggatttcaagattacggtgttgtcggaacgcaactgaaccgtcattcccacgaaagtgggaatctagaatctcggggtttcagtcatttccgatagattcccgccgcgtcgggggtttggattcccgcctgcgcgggaatgacgaatccatccatacggaacctgcaccacgtcattcccacgaaagtgggaatctagaacgcggggtttgggcaactgtttttatccgataagtttctgtgcggacaggtctggattcccgcctgtgcgggaatgacgaatttcaagattgcggtgttgtcggacgggttttgagattacggtgttgtcggagcgcaactgaaccgtcattcccacggaagtgggaatctagaacgcggggtttcagtcatttccgatagattcccgccgcgtcaggggtctggattcccgcctgcgcgggaatgacgaatccatccatacggaaacctgcaccacgtcattcccacggaagtgggaatctagaatctcgggggtttcagtcatttccgatagattcccgccgcgtcagggggctggattcccgcctgcgcgggaatgacgaatttcgagattacggtgttgtcgggaatgacgaatccatccatacggaaacctgcaccacgtcattcccacggaagtgggaatctagaacgcggggtttcagtcatttccgatagattcccgccgcgtcgggggtctggattcccgcctgcgcgggaatgacgaatccatccatacggaaacctgcaccacgtcattcccacggaagtgggaatctagaatctcggggtttcagtcatttccgatagattcccgccgcgtcggaggtctggattcccgcctgcgcgggaatgacgggtttcgagattgcgttgttgtcgggaatgcaactgaaccgtcattcccacggaagtgggaatctaggacgtaaaatctaaagaaaccgttttatccgataagtttctgtgcggacaggtctggattcccgcctgcgcgggaatgacgggtttcgagattacggtgtatcgggaatgatgggaaacggtgggaattgtgtaaaaaatgccgtctgaaggttcagacggcatcggtatcggggaatcagaagcggtagcgcatgcccaatgagacttcgtgggttttgaatcgggtgttttccaagcgtccccagttgtggtaacggtatccggtgtccaaggtcagcttgggcgtgatgtcgaaaccgacaccggcgatgacaccaagacccacgctgctgatgctgtggctttcgtgatagggaggtttgctgggatcagtttgtataataggacctccctgtgcagcgccttgcgttggtttagaggtaacaatcgtggttttggtttccaccgaatgaacttgatgtttaacgtgtccgtaggcgacgcgcgcgccgatatagggtttgaatttatcgttgagtttgaaatcgtaaatggcggataagccgagagaagaagaggcgtggaagctgccgtttccctgatgttttgtttgggtttctttgtagttgttgtttatctcttcagtaacttttttagtagaagaattactttctttccattttctgtaactggcataatctgccgctattctccagccgccgaaatcatagccgaccgacacccgggggtggatggaatgcgcacggatgtttctgaaataatcgcttaccgtgcttgtgttgtttgcaccggttgcttgcggataatcgtgggtaatgcgttcggcggcataagctaaatccgcctgcacataatacgggctgcggctgccgtcttcacttgccgcctgcgctgcggaagagaagagaagagaagagaagagaagagaagagaagagaagagaagagaagagaagagaagagaagagaagagaagagaaggttttttgggggctggattcattttcgactccgtattcggttttaactgattaaaaagaacaattttcaatgatgttgcaggagcggactatatcaggtttgtggcgatgtttcaacacaatatagcggatgaacaaaaaagagaacgattctctaaggtgctgaagcaccgagtgaatcggttccgtactatctgtactgtctgcggcttcgtcgccttgtcctgatttttgttaatccactataaagaccgtcgggcatctgcagccgtcattcccgcgaaagtgggaatctagaaatgaaaagcagcaggaatttatcggaaacgaccgaaaccgaacggactggattcccgcctgcgcgggaatgacgggattttaggtttctgattttggttttctgtttttgagggaatgacgggatgtaggttcttaggaatgacgtggtgcaggtttccgtgcggatggattcgtcattcccgcgcaggcgggaatctagaccttagaacaacagcaatattcaaagattatctgaaagtctgagattctagattcccactttcgtgggaatgacggttcagttgctacggttactgtcaggtttcgtttatgttggaatttcgggaaacttatgaatcgtcattcccgcgcaggcgggaatctagaccttagaacaacagcaatattcaaagattatctgaaagtccgagattctagattcccacgaaagtgggaatccaggatgtaaaatctcaagaaaccgttttatccgataagttcctgcactgacagacctagattcccgcctgcgcgggaatgacgggattttaggtttctgattttggttttctgtttttgagggaatgacgggattttaggtttctgattttggttttctgtccttgtgggaatgacgggatgtaggttcgtgggaatgacgtggtgcaggtttccgtgcggatggattcgtcattcccgcgcaggcgggaatctagaccttagaacaacagcaatattcaaagattatctgaaagtccgagattctagattcccgctttcgcgggaatgacgaaaagtggtgggaatgacggttcagttgctacggttactgtcaggtttcggttatgttggaatttcgggaaacttatgaatcgtcattcccgcgcaggcgggaatctagtctgttcggtttcagttatttccgataaatgcctgttgcttttcatttctagattcccgcttttgcgggaatgacggcgacagggttgctgttatagtggattaacaaaaaccagtacggcgttgcctcgccttagctcaaagagaatgattctctaaggtgcttaagcacgagtgaatcggttccgtactatccgtactgtctgcggctcgccgccttgtcctgatttttgttaattcactatatcgcgatttttcggcatttgcctttcggggcggcttgtgtctcgtgcgtgatgttgcgtgtgggaatgttcggattgtcagaagcaatatgggagaagatgatgtatgagataaaacagccttttcatagcggatacttgcaggtgtctgaaattcatcaaatttattgggaggaatcgggcaatcccgacggtgtgccggttatttttttacatggcgggccgggcgcgggggcttcgcctgaatgtcggggttttttcaatcccgatgtgttccgcatcgtcatcatcgaccagcgcggttgcggacgttcgcgcccgtatgcttgtgcggaagacaatacgacttgggatttggtggcggatattgaaaaagtccgtgaaatgctgggtatcgggaaatggctggtgttcggcggttcgtggggcagcactttgtcgctggcttatgcccaaacccatcctgaacgggtaaagggattggtgttgcgcgggatatttttgtgcaggccgtctgaaacggtgtggctgaacgaggcgggcggtgtgagccggatttatccggaacaatggcaaaaatttgtcgcgccgattgctgaaaatcggcggaaccggctgattgaggcgtatcacggattgctgtttcatcaagatgaagaagtgtgcctgtctgccgcgaaggcttgggcggattgggaaagctatctgatccgtttcgagccggaggaagtggatgaagatgcttatgcctcgctggcaatcgcgcgtttggaaaaccattattttgtcaacggcggttggttgcagggcgatagggcgattttgaacaatatcggcaaaatacggcatatcccgactattatcgtacaggggcggtatgatttgtgtacgccgatgcagagtgcgtgggcgctgtcgaaagcctttcccgaagcggaattgagggtggttcaggcagggcatcgtgcgttcgatccgcctttggtggatgcgttggttcaggcagttgaggatattttgccccatttgttgtaaaaagttccgcataaaaaagcagcttctgtttggaagctgcttttgttttgaatggtttaacgcagttcggaatggagtttgcccaataatgcggatgcgtctttgccggcatatgcgctgccgtctttgttgagcaggacgatgcgcgagccgttggcgacaggttctgcatagacaatcagttccggctgttcggcaggtttctccgctttgcctttgcccagcaggcgtttgaacaggccgggtttttgttcggtaactgcattgctttcgttcggggctttttgaaccaggaaggcgtggcgttcggtgttttgaccgacgacggtcagcccgatgcggtcgagggcgagcacggtgcgccgccagtttctgccgtagtcgccaaagacaatcaggcttttgccttcgatacgcgccatttcgttggcggcgggaagggtaggtttttttgccgatgcgttttccgcctgctgtccgtcaacgcccaaatattgcataaagcgcgtcaggaaagcggcttcgaggttgggatcggacggggagggctgccatacggtcgtgtctttgtctttgccgccgtacacttctttcatggctttgtgggcgaagaagatgtcggaaacgccgtttttgccctgttcgatacggacgatgaatttgtcgcgctcgccggtggagtagatgccgcccaagccgactttgtcgaagaggcggcgcaagctgtcttgggggattttggcgcggttttccgcccactcggtttccatttgtccgatggcgggttcttcggatttgatgtcgaagccgttttcctgccaaaaggctttcaggagcggccagatttcggcaggagacttgccgtcgacaacgagccagcgttggctgccgtcgcgctcgaggcggacacctttgacgcttttcaatacttcggcatcggcaggctgttggacggcgggtgtgcggcgtttttccaaatcgctggcgcggacggcgcccgaaccggcaggcaggcggtagaggttgccttggtcggggttgttcaaatcaggtgggacttcaagtttgatcaggcggtgcgaccggctttggtagtcgagcttgggctgttcggttttgctgccggagcaggcggcaagcccgatgagtgcgagcgcggcaatgacgggtttgatatgggtcatcgtgtcatcctgtgtgatggatattaaagtgtttgttgcgttatgccgtccgaacggttcggacggcatggctatatttaaagttgtcctgaggctttcagggcggcgcggacttttgcttgtccgttttccgtcagcggaacgagcggcaggcggacgtgcggttcgcatctgcccagggcggataccgcccatttcggtgcggcggggctgggttcgcagaacatggtgtcgtaaatcggaatcagtcggtcgttgagttcgcgtgcaagggcgatatcgccttgaagcgcggcgcggcacatatcggcaaagagcttgggcgcggcgttggcggctacggtaatcacgccgtgtccgccgcagagcatgaacggcagggcggtgtggtcgtcgccggaaaggacgacgaagccttcgggcgcgcggttgatgagttcgatgttgctgccgatgttgccgctggcttctttcacgccgacgatgttggggatttcggcaaggcgcaggatagtgtcgttagtcatgctgacgacggtacggccgggcacgttgtagataatcatcggaatcgaagtggcttcggcgatggttttgaaatgttggtaaatgccttcttgggagggcttgttgtaataggggacgacggagagggtgtagtccgccccggctttttcggcggcttgggaaagggcgatggcttcgacggtgttgtttgcccctgtgccggcgatgacggggacgcgtttggcaacgtgtttgacgacggcttcgatgacggcggtgtgttcttcgacggagagggtggcggattcgcctgtcgtgccgacggcaacgatgccgtccgtgccgttttcaatgtgccagtcgattaagtcgcggagttgttcgtaatggatgctgccgtcttgattcatcggggtaatcagggcaaccaagctaccttgtaacatacagaaccttttatcagttgtggtgtaggggcggtaatgcttccgattgtagcctactttaccgcaggtgtgaaatccggcgggttgcagatgtggggcgtttgcgccgaaaggtatggtggaaattgatttttcctgtttgaaatcattttattatattcgccggtttatgccggtgccgtcggatttatagtggattaacaaaaaccagtacggtgttgcctcgccttagctcaaagagaacgattctctaaggtgctgaagcaccaagtgaatcggttccgtactatttgtactgtctgcggcttcgccgccttgtcctgatttttgttaatccactataaaatgtggtaaacgtgtggaccagacggatgccgtctgaaatgcaaattgaagccgtgcggcagattcgctacaatccgcgcttggatttttcaacctttaaaataaggaaatacaatgagcggtcagttgggcaaaggtgcggatgcgcctgatttggtgtacggtttggaagacaggccgccgttcggtaatgcgctcttgagcgcggttacccatcttttggcgatttttgtgccgatgattacgcccgcgctgattgtgggcggcgcgctggaattgccggtggagatgacggcgtatctcgtgtcgatggcgatggttgcgtcgggtgtcggcacttatttgcaggtcaaccgcttcgggccggtcggttcggggatgctgtccatccagtcggtgaatttttcgttcgttaccgtgatgattgcgctgggcgcggggatgaaagagggcggtttgactaaggatgcgatgatttcgacgctcttgggcgtatcgtttgtcggcgcgtttttggtgtgtttctcggcgtggcttctgccgtatttgaaaaaagtgattacgccgacggtcagcggcgtggtcgtgatgctcattggtttgagtttggtacacgtcggcattaccgatttcggcggcggcttcggcgcgaaggcggacggcacgttcggctcgatggaaaacttggggctggcatcgctggtgttgctgattgtgttggtgttcaactgcatgaaaaacccgctgttgcgcatgagcggcattgcggtcgggctgattgccggctatatcgtcgcgctgtttttgggcaaggtggatttttccgcgctgcaaaacctgccgctggttacgctgcccgtaccgtttaaatacggttttgctttcgactggcacgcgtttattgtggcgggcgcgattttcttgttgagcgtgtttgaggcggtcggcgatttaaccgcgacggcaatggtgtccgaccagccgattgaaggcgaggaatacaccaaacgcctgcgcggcggcgtgttggctgacggcttggtgtcggtgattgcgacggctttgggttcgctgccgctgacgacgtttgcgcaaaacaacggcgtgattcagatgaccggcgtggcttcgcgccatgtgggcaaatatattgccgtgattttggtgctgttgggtctgttccccgttgtcggtcgcgcgtttacgacgattccgagtccggtgttgggcggcgcgatggttttgatgttcggcttaattgcgattgcgggcgtgcggattttggtcagtcacggcatccgcaggcgcgaagcggtgattgcggcaacgtcggtcggtttgggcttgggtgtcgcgtttgagccggaagtgtttaaaaacctgcccgtcttgttccaaaactctatttccgccggcggcattacggcagtcttgctgaatttggtcttgcccgaagataaaaccgaggcggcggtcaagtttgataccgaccacttggaacactgattttgaaaatgaatgccgtctgaaacagaatccctgtttcagacggcattgtttttgaggcttatactttttcgttttttaatacgcgttgtcggcgtgtttcacttaataccattccggcagacacggagacgttcatgctttcgactgtgccgaacatgggtatagacaccagcatgtcgcaatgttcgcgcgtgaggcggcgcataccgtcgccttcgttgcccattacccacgccgcgctgtcgggcagattgcaatggtaaaggtcggactcgccgctcatatcggtgccgataatccaaatgccgtattctttcaattcgcgcagggtgcgggcgaggttggttacggtgatataggggacggtttccgccgcaccgcaggcgactttgctgacggtggcgttcagccccgcgcttttgtctttcggtgcgatgacggcgtgtacgcccattgcgtcggcggtacgcaggcacgcgccgaggttgtgcggatcggtgatgccgtcgagtatcagcagcagcggcggttcgctgaggttttccaatacgtcttcgaggtggacgtggtttttggaggcatcgataaatccgaccacgccctgatggcgcgcgcctttgctgatggcgttgaggcggtcggcatcggcaaaatatacgcggatgttttcgtttgccgccttttccaacacttcgcgcgtgcgtgcgtctgatttgccttcttggatgtagagttcgacgatggatttggggttttgccacaatcgggcgttgacggcgtggaagccgtagatgggtctttggtttgccatgatggtgctttgtaaaaagggttcagacagcattatagcaatttgccggtatgccgtctgaaagggttaaaacaggtaggcgatgtatttcaccaacaggataaacaagatggatacggcgcagccgattttgaacgccgtgccgacgacaagccccaacagcgtacccaagcccgctttacctgcctgaagcatattgcgccgttcgatcagttcgcctgccgccgcgccgataaagggaccgagtattagtccgggaagggagaaaaatatgccgatgatgctgccggccaatgcgccgcgaacggcgagcttgcccgctccggtatattttgtcccccatatgcctgccacatagtccgccagtatgccggcaaggctgatgagtccgaccgtccacaaaacgcccgcgccgtagatttggtagccgccggcataggcaagcagccatgttccggcaaacatcaatgccaatccgggcagggcggggtaaacgatgcccgccgtgccgacggctatcagggcgagggcgaggatgacggtcagtacggtcataggttcaaccttttcttttgttttgaaaaaaacggcttaacacggcgcggcattcttcttgcaggattccgccccgtatggcggtgtgcgtattgaggcgtttgtcggcaaacaggttgacgatgctgcctgccgcgccggttttgggttctgccgccccgtagatcacacgcctgattcgtgcctgtatcagtgcggacgcgcacatggcgcagggttcgagggtgatatatatgtcgcatccgtcaaggcggtagttttgtatttctctgcctgcctgtgccaaggcgttgatttcggcgtgtcggctgacattgcagtcggcaatgcaggtgttgtgtgccgatgcgatgattttgccgtctgaaacgatgactgccccgacgggtatttcgccgtcggcggaggattgttctgcttggcgcagtgcttcgcacatgaagtgttccatttcttcctgcggcggaaaggcggcgacgggcggatggttttttaactcggcaagcaggcgggctttatgcgcttgggacatttcttgcggcggcgtgccgtccagcagcgactcgagttgccacagtgtgcttttcgtgagggtcaaacccgatgctttgagcagcagaaaggctttgaccgaaccgttttgccgcagttcttcgagtgtacggataccgagcctgtgcagggcggcgacggttttgggggcgagcggcggtgtggtcagcatggtttatgcgccgaaaaaccgttttgccgcctcaatcaggcgtgtgcatgaagtgcagtctgaaaacgggtcggcaacgcagtctaaaggtgttttgcgcaaccaagtcagttggcgtttggcaagttggcgggtggcggcaatgcctttctcgacaaatgccgggaaatcggtttttccatccagatatttccatgcctgacggtagccgacgcagcggatggcgggggagtaggcggtcaggccgggatagcggcggcgcaggttttctacttcgccgataaagccctgttcaagcatcaggtggaaacgcagggcgatgttttcatgcaggcgggcacggttttcgggaatcagggcggcggtatgcaaatcaaaagggagcgtatgggaggtcaggctgccgagatgtgtgctcatcggtttgccggttaaataataaacttccaaagcgcgtccgatacgctggctgtcgttcggtttcagacggcatgcggtttcagggtcgactttttgcagggtgcggtagaggaaatccaagccgtacatctgtttttgttcgtccaagtcggcacgcaggcaggcgtcggcttcgggcaaatcgttcaaaccttgggtcagggcgcggaaatacatcatcgtgccgccgacaataagggcaaacctgccgcgtgaggaaatttccccgaccaagcgcgtgcagtcttcgacaaagcgggcggcgctgtatgattcggtaggcgggatgatgtcgataaggtggtgcgggacaaaggcgcgttcggaggcggacggtttcgccgtgccgatgtccatatcgcggtaaaccagcgcggaatcgaggctgatgatttcgacaggcagggtttcggcaattttgagggcgagcgcggttttgcctccggcggtcggcccgagcagggcaaaggctttcggggtcggcataacgtttcaggtttggaaaaatacggattatagcggaaagcgtgccgacgttatattttggtttgcggaagcacgccgacggcaagggggcgtgtttaccgtatgcctttatatagtggattaacaaaaaccagtacggtgttgcctcgccttagctcaaagagaacgattctctaaggtgctgaagcaccgagtgaatcggttccgtactatctgtactgtctgcggcttcgtcgccttgtcctgatttttgttaatccactataaaatttcaaaccgacgcgccgggttttcaatatgcccgcgcccgatgccgccttgtccgcaggcatcagcggcagtgtccgattttttggggaatgcccgtcccgggcgtatttaaaggttcggcggtgcggcgttttcctgcggcaaggcttcagacggcatctctggtgcgtccgttagacaaggcgtgcgcttggggcgataatggcgttttgcttttttgaaagccttgcaatgtcccgaaacctgcttgtccgctggcttgccgtctgcctcatcccgttggcgacgcttgccgttttcgccgccaatccgcccgaagacaaactccagcatctgatcaacggcatcatccttgcctgcgaagcgacgtttttgtttaaattcgtccttttcgacaccatcaagcatcatttgaaacaagagtttgatttgaaacgtcaaactatgttgctgtttattccgattattttgctgattgtgtatttgttccactattttggcgcgttttagcccgtttccgttatttctatgaatactcctccttttgtctgttggattttttgcaaggtcatcgacaatttcggcgacatcggcgtttcgtggcggctcgcccgtgttttgcaccgcgaactcggttggcaggtgcatttgtggacggacgatgtgtccgccttgcgtgcgctttgccctgatttgcccgatgttccctgcgttcatcaggatattcatgtccgcacttggcattccgatgcggcagatattgataccgcgcctgttcccgatgtcgtcatcgaaacttttgcctgcgacctgcccgaaaatgtgctgcacattatccgccgacacaagccgctttggctgaattgggaatatttgagcgcggaggaaagcaatgaaaggctgcatctgatgccttcgccgcaggagggtgttcaaaaatatttttggtttatgggtttcagcgaaaaaagcggcgggttgatacgcgaacgtgattactgcgaagccgtccgtttcgatactgaagccctgcgagagcggctgatgctgcccgaaaaaaacgcctccgaatggctgcttttcggctatcggagcgatgtttgggcaaagtggctggaaatgtggcgacaggcaggcagcccgatgacactgttgctggcggggacgcaaatcatcgacagcctcaaacaaagcggcgttattccgcaagatgccctgcaaaacgacggcgatgtttttcagacggcatccgtccgcctcgtcaaaatccctttcgtgccgcaacaggacttcgaccaactgctgcaccttgccgactgcgccgtcatccgcggcgaagacagtttcgtgcgcgcccagcttgcgggcaaacccttcttttggcacatctacccgcaagacgagaatgtccatctcgacaaactccacgccttttgggataaggcacacggtttctacacgcccgaaaccgtgtcggcacaccgccgtctttcggacgacctcaacggcggagaggctttatccgcaacacaacgcctcgaatgttggcaaaccctgcaacaacatcaaaacggctggcggcaaggcgcggaggattggagccgttatcttttcgggcagccgtcagctcctgaaaaactcgctgcctttgtttcaaagcatcaaaaaatacgctagaatagcgcgttttacgacaaccgatttgattggaaaatcacaatgaaaacagcacaagaactgcgcgccggcaatgtatttatggtcggcaacgatcctatggtcgttcaaaaaaccgaatacatcaaaggcggccgctcttccgccaaagtcagcatgaaactgaaaaacctgctgaccggcgcggcttccgaaaccatttacaaagccgacgacaaattcgacgtggtcatcctgtcccgcaaaaactgtacgtacagctactttgccgacccgatgtacgtctttatggacgaagaattcaaccaatacgaaatcgaagctgacaacatcggcgacgcgttgaaattcatcgttgacggtatggaagaccaatgcgaagtaaccttctacgaaggcaaccctatctccgtagaactgcccaccatcatcgtgcgcgaagtcgagtacaccgagcctgccgtcaaaggcgatacttccggcaaagtgatgaaaaccgcccgcctggtcggtggcaccgaaatccaagtgatgtcttacatcgaaaacggcgataaagtcgaaatcgacacccgcaccggcgaattccgcaaacgcgcctgatttgccgcattgaaaaatgccgtctgaaaacgtttcagacggcattttttttatattcgccccgtgtttggattgaagtagatgtttttttcgtaaacgacaatacgcgtgattttgccattttcgtcaaaatggatgtctaaaaacggtttgtcgggattgcgttcacggttggacagccggaagagtgattggttttcaagcatttctccgtgtattttcagatagccgggcaattggctgatgtattggaaattgccgccaagtccgttgttgtgccggctcgaataggcaggggttgccgaaacttcaaaataacgcgtgcgtttcggctcctcgccttgtccgcgggtttcttgactgccctgtatcagcaacagcgtcgcttctcggaggcggcgttcctgttccatcaaggcattttgtgcctgccggctgatcgtgcgctttccgtaacgcaagtcttcaattgccagtatgattttctgatggtagtcgggatcttcagggcggatgtcgggaaacagcagccgctgtatgttgtcatagccaccgtcgggtaagccgaaacgggtttccagttcgtgatgggaaagggcaaacagacagtccgagtcaatgtgttcggcgatttgctgcatgagatcgtcaatgccggtggcggggtgcaggctggtgcaatttgacggcggcgcgctttctgcctgcttgacgttatcaggggcggatgcggtcggttgcaaatcggtttgggaaggagctgatgacgcggaggacgaagcagcggatgcaccgacttctttggttttatcgtctttgctcggagaacacgcggtcagcatgattgcggtaagccataagagaagtgatgaggttttgtttttcattctattgtttccagtattaaagaggccgtctgaaaacctaccgtttcatttttcagacggcctgttgttaatagaaccgaagaacctgttaatgccgacaaggttctcaacctgtcttacccgacgcggtaaaacgccaggctgcccaaaaggttggggaaatgtttgacctgtctgttgcccgtcatcacggcgcgctcgaggatgcggatgttgtttttggcgcacaataaatcaaagtctttgagcgtgcaccaatggatattgggcgtgtcgtaccaatggtagggcatacgttcggaaaccggcatatgtccgccgagtgcgatttggacgcggttgcgccagtagccgaaattcgggaagctgacaatcgcctgtttggcaacgcgcatcaggcagcgcaggattttttcggtattctgcatcgcttggatggtttggctcaacacaatcacatcaaaactttgatcgttgaatgcggttaaaccttcttccaaatcggcttggataacatttacgccgcgcgacatcgcggcgatgacgctatttgtgtcgatttcgatgccgtagccgctgcattttttgtgttcgaccaatgcggcaagcagttcgccgtcgccgcagcccaagtccaagacgcggctgccttcgggtatccggtcgtaaatcagttgcaaatcatcgcgcaggttcattgctgacattccttataaacgttgttcatataggcggcgaccgcacgcatataggcttcgtcttccattaaaaaggcatcgtgcccgtgtgcggatttgacttcgatatactgcacggatttttgggcggcaatcagtgccttgaccagttcgtgcgaacgttcgggtgcgaaacgccagtcggtgctgaagctggcgacaaagaatttcgctttcacattttgcagggcgcgggtcaggctgtcgccgaaatctgccgccggatcgaaatagtccaaagccttggtcatgagcaggtaagtgttggcgtcgaaccgtccgacgaatttgtcgccctgatagcgaagataggattccacttcaaattcaacaccaaagccgtattgataaccgttggaacgcaaatcgcgtccgaattttttgcctaaaccgtcttcggcaagataagtgatgtgtcccatcatgcgggcaatccgcaagccccgtgcaggaacggtattgtggctgcggtaatgtccttcattgaaatcagggtcggtcaaaattgcctgacgcgccacatcgttaaacgcgatattttgcgtggacagtttcggcgcagacgcaatcactaaagcatggcgcacgcgctcgggataggaaatcgtccactgcaaggcctgcataccgcccaagctgccaccgacaatcgccgcccattgttcgataccgagatagtcggcaagcgcggcttgggattttacccagtccttcaccgtaaccaccggaaaatccgcgccgtattccctgcccgtttcaggattaatcgacaaaggcccgctgctgccgtcgcagccgcccagattattcaaaccgaccacgaaaaaacgttccgtatcaatcggtttgccaggtccgaccatattgtcccaccagcccgtatatttatcttccgccgaatgcctgcccgcaacatgatggttgcccgacagcgcgtggcagattaaaaccgcattgtttttttcagcattcagctcgccgtaggtttcaatcatcagatcgaaacgcggcaaagttttaccgttttccaaaaccagcggcatctcaaacggaattttttggggcattacaatgcccaccgaggcattttgactcatatcctgttccaacaaatgcggcgaaaagcgttattatatcgcaaacggcatgactttttgacacggtcggacaagcagccggacgcgtttgaccctcatccgccgcacacgaatcatactttttcagacgacctccaccgcttcccgacatgataggcagacttttccgtatttttttctttttcgcacttgccgcgttgattatcaaccgccttttcagccgcaggcaaaaacgcgccctgcgcgaagtcgccgaaatcagcgcatgggtactgctcggtgcagccgccgcgatgctgttttggtatctgtttatgctgtatttcaaacacattccggattcgtattgacggaaaaaatgccgtctgaaacgcatttttctgtttcagacggcatatttgatgaaaagggcttgcggtaggaggtgctttatagtggattaactttaaaccagtacggcgttgcctcgccttgccgtactatttgtactgtctgcggcttcgtcgccttgtcctgatttttgttaatccactatacaaccgaagcaggaagggcagggggtcagcgttggcgcgctttaaaacgcggattgcttttgcagatgacgtaaactttgcccctgcgcctgacgatttggcagtcgcggtggcgttgtttggcggttttgagtgaagacagaacctgcattatttgtcctttctaaacgatgacattacggattggaaacgttggttgaatttgctggcacggccttcggtgttgacgttgcgctgtttgccagtatagacgggatgggatgcggaagaagtatccagcgaaaacagcggatattctttgccgtctgtccaaaccatcgtttttccgtgtgtttcggcacaggagcggattaaccagccttcattggcgctgctatcgaaaaaaaggacggttcggtaattgtcgggatgaatattcggtttcatatattgccttgctttcagtgttataacataacaaactctagcatagtttagaagggctgtacaaggaaatttaactatttttgtaatatattagaaattttcatgataaatctgaaaattttgaaattgactcatgtttggcgcaactttattatgttgcctgaaacatcatataaaagataataaaaggtacgcagccatgaattacgcaaaagaaatcaatgcgttaaataacagcctttccgatttgaaaggcgacatcaacgtttcattcgaatttttcccgccgaaaaacgaacaaatggaaaccatgctgtgggattccatccatcgcctgcaaaccttgcacccgaaatttgtttccgtaacttacggtgcaaactcaggcgagcgcgaccgcacacacggcatcgtcaaacgcatcaaacaggaaaccggcttggaagccgcgcctcacctgaccggtatcgacgcttctcccgacgaattgcgccaaattgccaaagattattgggacagcggcatccgccgcattgtcgccctgcgcggagacgagccggccggttatgagaaaaaaccgttttacgccgaagacttggttaagctattacgctccgtcgccgacttcgacatctctgtagcagcatatcccgaagtgcatcccgaagcgaaatccgcacaagccgacctgattaatttgaaacgcaaaatcgatgcgggcgcgaaccacgtcatcacccaattcttcttcgatgtggaacgctacctgcgcttccgcgaccgctgcgtgatgttgggtatcgatgtggaaatcgtccccggtattttgcctgttaccaacttcaagcagctcggtaaaatggctcaagtaaccaacgtcaaaatcccaagctggctgtcgcaaatgtatgaaggtttggacgacgaccaaggtacgcgcaatctggtggcggcaagtatcgccatcgatatggtcaaagtcctgtcccgcgaaggcgtgaaagatttccacttctatacgcttaaccgcagcgagctgacttacgccatttgccatattttaggcgtgcgcccttaaagccgtatcaaacagtttcagacggcatctaaggtgtctaaaaagcaaaacaccgccccatccgagccattctgatttacaataccggccgattcggattgaaccggtccttacaaaatccaactggagagttcaacatgacaacattacatttctcaggcttcccgcgtgtcggcgccttccgcgaattgaaattcgcacaagaaaaatactggcgcaaagaaatcagcgagcaagaattgctggctgttgctaaagacttgcgcgagaaaaactggaaacaccaggtcgctgccaacgccgatttcgttgccgtaggcgatttcactttctacgaccacatcctcgacctgcaagtcgccaccggcgcgattcccgcccgcttcggcttcgacagccaaaacctgtctttggaacaattcttccaactggcgcgcggtaacaaagaccaattcgctatcgaaatgaccaaatggttcgacaccaactaccactacttggtgcctgaattccacgccgataccgaattcaaagccaatgccaaacactatgttcaacaactgcaagaagcccaagccctcggtctgaaagccaaaccgaccgttgtaggtccgttgactttcctgtgggtgggtaaagaaaaaggcgccgtcgaattcgaccgtctgagcctgttgcctaaactgttgcctgtttacgttgaaatcctgactgctttggttgaagccggtgccgagtggattcaaatcgacgagcctgctttggctgtcgatttgcctaaagaatgggtggaagcctacaaagacgtttacgctactttgagcaaagtaagtgccaaaatcctgttgagcacttacttcggttctgttgccgaacacgccgcattgttgaaagccctgcctgttgacggtctgcacatcgacttggtacgcgcccccgagcaactggacgcgttcgccgactacgacaaagtcctgtctgccggcgtgattgacggccgcaacatttggcgcgccaacctgaacaaagttttggaaactgtcgagcctctgcaagccaaactgggtgaccgtttgtggatttccagctcttgctcgctgctgcacactccatttgacttgtcagttgaagaaaaactgaaagccaacaaacccgacctgtactcttggttggcattcaccctgcaaaaaacccaagaattgcgcgttctgaaagctgcattgaacgaaggccgtgattctgttgccgaagaactcgccgccagccaagctgctgccgactcccgtgccaacagcagcgaaatccatcgtgcagacgttgccaaacgcctggccgatttgcctgccaacgcagaccaacgcaaatctccatttgccgaccgtatcaaagcgcaacaagcatggttgaacctacctctgctaccgactaccaacatcggttctttcccgcaaaccaccgaaatccgccaggcacgctcagccttcaaaaaaggcgaactgtctgccgccgattacgaagccgcgatgaaaaaagaaatcgccttggtggttgaagagcaagaaaaactggacttggacgtactggtacacggcgaagccgagcgtaacgacatggttgaatacttcggcgaattgttgagcggttttgcattcactcaatacggctgggtacaaagctacggctcacgctgcgtgaaaccaccgattatctttggcgacgtaagccgtcctgaagccatgaccgtggcttggtctacttacgcacaaagcctgaccaaacgcccgatgaaaggtatgttgaccggccctgtaaccattctgcaatggtctttcgtccgcaacgacattcctcgctctaccgtgtgcaaacaaatcgcactggctctgaacgacgaagtattggatctggaaaaagccggcatcaaagtcatccaaattgacgaacctgccatccgcgaaggcttgccgctgaaacgcgccgattgggatgcctacctgaactgggcgggcgaatccttccgcctgtcctctgccggttgcgaagacagcacccaaatccacactcatatgtgttactccgagttcaacgatatcctgcctgcgattgctgcaatggatgcggacgtgatcaccatcgagacttcacgttccgacatggaactcttgaccgcgttcggcgaattccaatacccgaacgacatcggcccgggggtttacgacatccacagcccgcgcgtaccgacagaagccgaagtggagcacctgttgcgcaaagccatcgaggttgtaccggttgaacgtctgtgggttaacccggactgcggcctgaaaacacgcggctggaaagaaactctggaacaactccaagtaatgatgaacgtaacccgaaaactgcgtgccgaattggcgaaataagccgagaccgtatgaataaataccgtctgaaagcctttcagacggtattttgtcctgatttgcggcgcaagggcgcagttgccggaaaatcttttcattgcagcttgtttttttctaattcggctttatatgtgggaaacaggcaaatcggagttgtgtttgatagttttaaataatttatattatttgaactataaattatacaaatcattttgcatggggtagaatgcccagcgattcacaattatttctcaaaccaatctattaaggagcttaaaatggctttgcaagatcgtaccggtcaaaaagtaccttccgtagtattccgcacccgcgtcggcgacacttggaaagatgtgtctaccgatgatttgttcaaaggcaaaaaagtagtcgtattctccctgcccggtgcatttaccccgacttgttcttcttcacacctgccgcgttacaacgaattgttcggcgcgttcaaagaaaacggcgttgacgcaatctactgcgtatctgtaaacgatacgttcgtaatgaacgcttgggctgccgaagaagaatccgacaacatctacatgattcctgacggcaacggcgaatttaccgaaggtatgggtatgctggtcggtaaagaagacttgggcttcggtaaacgctcttggcgttactccatgctggttaacgacggcgtggttgaaaaaatgttcatcgaacctgaagaaccgggcgatccgttcaaagtatccgatgcagatactatgctgcaattcgttgctcccgattggaaggctcaagagtctgtggcaattttcactaaaccaggttgccaattctgcgctaaagccaaacaagctttgcaagacaaaggtttgtcttacgaagaaatcgtattgggcaaagatgcaaccgtcacttccgttcgcgccattaccggcaagatgactgcccctcaagtcttcatcggcggtaaatacatcggcggcagcgaagatttggaagcttacttggctaaaaactgatagctgtttgcttaaggcggtttaattaaactgtctgatataccggatagagttattcgggcggttctacactaccgctccgaataactctatatttataagagaatttggatattgttgcactcaatcgaaattttgtttttatttatctgaatgatgtttttgattgggaaaatatttaaatgccgtctgaaaccgatatgttctgtgtcggcaatgtttcagacgaaaacggaaggacaaagattatgaaaaaaattcaagcggatgtcgtcgtaatcggcggcggtactgccggtatgggtgcgtttcgcaatgcccgtttacattcggataatgtttacctgattgaaaacaatgtgttcggcacgacctgcgcgcgcgtgggctgtatgccttccaaactcttgattgccgccgcagaggcgcgtcatcacgcattgcataccgacccgttcggcgtgcatttggacaaagacagcatcgtcgtcaacggtgaagaggtcatgcagcgcgttaaatccgagcgtgaccgttttgtcggctttgtcgttgccgatgtggaagagtggcctgccgacaagcgcattatgggttcggctaaatttatcgacgagcataccgtccaaatcgacgagcatactcaaattacggcaaaaagtttcgtgattgctaccggttcgcgtcccgtcatcctgccgcaatggcagtctttgggcaatcgtttgattatcaacgatgacgttttctcatgggatacgctgcctaagcgcgttgccgtgttcgggccgggtgttatcggtttggaactgggtcaggcattgcaccgtttgggcgtgaaagttgaaattttcggtttgggcggaatcatcggcggcatttccgaccccgtcgtttcagacgaggcgaacgccgtgttcggcgaagaattgaaactgcatctggatgctaaaaccgaggtcaaactcgatgcagacggcaatgtagaagtccattgggagcaggatggcgaaaaaggcgtatttgttgccgaatatatgctggcagccgtgggccgccgtccgaacgttgacaatatcggtttggaaaatatcaatatcgaaaaagatgcgcgcggcgtacctgttgccgacccgctgaccatgcagaccagtattccgcatatcttcatcgcaggcgatgcgtccaaccaactgcctctgctgcatgaagctgccgaccaaggcaagattgccggcgataacgcgggccgctacccgaatatcggcggcggtttgcggcgcagcaccatcggcgtggtgtttaccagtccgcaaatcggctttgtcggtctgaaatacgcgcaggttgccgcgcaataccaagccgacgaatttgtcatcggcgaagtatcgttcaaaaaccaaggccgcagccgcgtgatgctggtgaacaaaggccatatgcgcctgtatgccgaaaaagccaccggccgctttatcggcgcggaaatcgtaggccctgccgccgaacatttggcgcacctgttggcttgggcacatcaaatgaagatgaccgttccgcaaatgctggatatgccgttctaccatcccgttatcgaggaaggtctgcgtaccgcgttgcgcgatgccgatgcgaaattgaaagcctgaccgatatggcaaaacaatgccgtctgaaattttttcagacggcattttgtttttggggatggggtcggatgctgataccgtgtcgggaagggggcggcaaaactaaaaatctttcttttaatctgctgtttccacgcgtgtttgtcaaaatctatcagtttgtttttaaaatacactgttcaaaatgggataaaacaggtaaattaacgtttatgtaacccagtgtagcaatgggtttacggtttttgagtcgatatataactacagaggaattgactatgtctgccaaaccgcgtcctgtttatctggatttgccgaacatccgtctgccgatacccgggatagtttccatccttcaccgcatcagcggggtcgggctgtttattatgctgcctttcctgctgtatttcctgtccggtaccctgagtcaagagtctgcatttgaaacttaccgtgccattgtttcccatcctttggtcaagctggttttaatcggtgtattgtgggcttatctgcaccattctctcgccggtatccgctttttatttttggatgcgcacaaaggccttgagctgaatactgcgcgcaataccgctaaagccgtatttgcttctgcattggttttgactgtcgttttgggagcgttgttatggtagaacgtaaattgaccggtgcccattacggtttgcgcgattgggtgatgcaacgtgcgactgcggttattatgttgatttataccgttgcacttttagtggttctattttccctgcctaaagaatattcggcatggcaggcattttttagtcaaacttgggtaaaagtatttacccaagtgagcttcatcgccgtattcttgcacgcttgggtgggtatccgcgatttgtggatggactatatcaaacccttcggcgtgcgtttgtttttgcaggttgccaccatcgtttggctggtcggctgtctcgtgtattcagttaaagtgatttgggggtaagtatgggttttcctgttcgcaagtttgatgccgtgattgtcggcggtggtggtgcaggtttacgcgcagccctccaattatccaaatccggtctgaattgtgccgttttgtctaaagtgttcccgacccgttcgcataccgtagcggcgcagggcggtatttccgcctctctgggtaatgtgcaggaagaccgttgggactggcacatgtacgataccgtgaaaggttccgactggttgggcgaccaagatgcgattgagtttatgtgccgcgccgcgcctgaagccgtaattgagttggaacacatgggtatgccttttgaccgtgtggaaagcggtaaaatttatcagcgtcctttcggcggccatactgccgaacacggtaaacgcgcggtagaacgcgcctgtgcggttgccgaccgtacaggtcatgcgatgctgcatactttgtaccaacaaaacgtccgtgccaatacgcaattctttgtggaatggacggcacaagatttgattcgtgatgaaaacggcgatgtcgtcggcgtaaccgccatggaaatggaaaccggcgaagtttatattttccacgctaaagctgtgatgtttgctaccggcggcggcggtcgtatttatgcgtcttctaccaatgcctatatgaataccggcgatggtttgggtatttgtgcgcgtgcaggtatcccgttggaagacatggaattctggcaattccacccgaccggcgtggcgggtgcgggcgtgttgattaccgaaggcgtacgcggcgagggcggtattctgttgaatgccgacggcgaacgctttatggaacgctatgcgccgaccgtaaaagacttggcttctcgcgacgttgtttcccgcgcgatggcgatggaaatctacgaaggtcgcggctgcggtaaaaacaaagaccatgtcttactgaaaatcgaccatatcggcgcagaaaaaattatggaaaaactgccgggcatccgcgagatttccattcagttcgccggtatcgatccgattaaagacccgattcccgttgtgccgactacccactatatgatgggcggcattccgaccaattaccacggcgaagttgtcgttccgcaaggtgaagattacgaagtgcctgtaaaaggtctgtatgcggcaggtgagtgcgcttgtgcttccgtacacggtgcgaaccgcttgggtaccaactccctgttggacttggtggtattcggtaaagctgccggcgacagcatgattaaattcatcaaagagcaaagcgactggaaacctttgcctgctaatgcaggtgagttgacccgccaacgtatcgagcgtttggacaaccaaaccgatggtgaaaacgttgatgcattgcgtcgcgaactgcaacgctctgtacaactgcacgccggcgtgttccgtactgatgagattctgagcaaaggcgttcgagaagtcatggcgattgccgagcgtgtgaaacgtaccgaaatcaaagacaagagcaaagtgtggaataccgcgcgtatcgaggctttggaattggataacctgattgaagtggcgaaagcgactttggtgtctgccgaagcacgtaaagaatcacgcggtgcgcacgcttcagacgaccatcctgagcgcgatgatgaaaactggatgaaacatacgctgtaccattcagatatcaataccttgtcctacaaaccggtgcacaccaagcctttgagcgtggaatacatcaaaccggccaagcgcgtttattgatgcgttttcagacagtcttcgcctcaaaggtcgtctgaaatctaaccatacccacattgaactgcttgaatttataatacaaaatcattgggcagttgatgagaaaaggaacacttctcatggaaaaaatgagttttgaaatttaccgttacaacccggatgttgatgccaagccttatatgcagcgttacgagttggaattggaaccgaccgacgtgaaacttttggatgctttggtacgcctgaaagcacaagacgataccttgtctttccgccgctcctgccgcgaaggcatttgcggatcggacggtatgaacatcaacggcaaaaacggcttggcgtgtttgaccgatctgcgtggcttgaaacagccagttaaaatccgtcctctgccaggtctgcctgttatccgcgacctgattgtggatatgacccagttcttcaaacaataccattccgtcaaaccttatgttgtcaacgataatccgattgatgcggacaaagagcgtctgcaaactcaggaagagcgtaaagagttggacggtttgtacgagtgtattttgtgcgcctgctgttcgactgcctgcccgtcattttggtggaaccctgataaattcgtcggtccgtccggtttgctgaatgcttaccgtttcattgcggacagccgtgataccatcactaatgagcgtttggataatctgaacgacccataccgtttgttccgttgccacaccattatgaactgcgtagacgtatgtcctaaacacttgaatccgacccgagccatcggtaagattaaagagattatgttgaaacgggccgtttaagaaatgatggtttttgacgatattgccaaacggaaaatccgttttcaaacccgccggggattgttggaattagatttaatcttcggcaggtttatggaaaaagaattcgagcatttgagcgataaagagctgtccgagttttccgaaatccttgaatttcaagatcaagaattgcttgccttgattaacgggcattcggaaacggacaaagggcaccttatcccgatgcttgaaaaaatcagacgggcatgaggcatctgaaatctgcctgcaggcagatttcaaaatgcaaaagccgtctgaaggcaaagaacgtgctgcggatgcagtaacgtgggttataacttgcaaaggagcaataatatgtccaaatcaatcaaactcaacgtaccgggtcaggcaggtttggagctgccggtattggaagccagcatcgggcacgatgtggttgacattcgggggctgacaaaaaatacaggtttgttttccttcgaccccggatttgtttcaaccgcaagctgtgagtctaaaattacttacatcgacggcgatcaaggcttgctttattatcgcggataccccatcgagcagctggccgaaaagtccgattatttggaagtctgctacctgttgatttacggcgaactgccgactcccgagcaaaaggcagaatttgacaataccgtccgccgccacacgatggtgcatgaacagctgacttggttcttccgggggttccgccgcgacgcgcatccgatggcgatgatggtcggcgtggtcggcgcactgtctgcgttctaccaagacagcttggacattagcaatcccgaacaccgcaaaatcgcgatttaccgcctgatttctaaaatcccgaccattgcggcaatgtgctaccgctattcaaacggtctgccgttcaattatccgaagaataatctttcttattccgaaaacttccttcatatgatgttcgccacgccgtgtgaagactacaaacccaatcccgttttggcacgcgcgctcgaccgcatctttattttgcatgccgaccacgagcaaaacgcctcaacttcaaccgtccgtctggcagggtcttcgggtgcgaacccgtttgcctgtattgctgccggtatcgcctgcctgtggggtgcttcgcacggcggtgcgaacgaagccgtgttgaaaatgttggacgaaatcggcgatgtgtctaatgttgccgcatacatggaaggtgtgaaacaacgcaaataccgtctgatgggcttcggtcaccgcgtgtaccgcaatatggatccgcgtgccagcattatgcgcgaaacctgctatgaagttttgaaggaattgggcttggaagacagtccgaaattcaaactggcgatggaattggaacagattgcgctgaaagacccgttctttatcgaacgcaaactgtatccaaacgtcgatttctattccggcatcgtcctgtccgcgctgggcatcccgaccgaaatgtttaccgtcatcttcgccctgtcgcgcagcgtgggctggatttcgcactggcacgagatgattagcgatccttcgctgaaaatcggccgcccgcgccagctttataccggttcggaacgccgcgattatgtgccgccaggcgagaggtaacatacattaatatattgtcaaacaggcaatatcagagaaccggattgtttcccgaatccgtctgattgtagtcggatgaaatcaagacaagcaatccggtttaaaatagggtagaataaaatgtcttttcaggcggcatcagtttagccgtcaggacgcggacttctaccctttgtttatattttaaagaaaagagcgcacgccatgatggacgaaaaactcaatttctcttacctgttcggttcaaacgcaccttacattgaggaattgtacgaggcttttttggaaaaccccgatgcggttgatgaaaaatggaagcagtatttcaccgatttgagcaaacagccggggacggttgctgtcgatgtcgcacacacaccgattcgcgaatcatttgttactttggcgaaaaagaaaattgcatctgccgttgcgggcggtgcggatgaggcaatgctgaaaaagcaagtcagcgttttacggctgatttccgcctatcgtatccaaggcgtgggtgcagcccaacttgatccgctcaaacgtatccccccgcgcgatattgaagccctcgatccgaaattccacggtctgtcagatgccgatatggcgcttcaattcaatatgggcgagggcgattttgccaatcgcggcaaactgcctttgtcccaaatcatcagcaacctcaaacaaacctactgcggccacatcgcattggaatatatctatattcccaataccgaagagcgccgctgggtacgcaattattttgaaagcgtattgtccacaccgcattacaatgccgatcaaaaacgccgtatcttgaaagagatgactgctgccgagactttggaacgttatctgcataccaaatatgtcggtcagaaacgtttcggtgtcgaaggcggcgaaagcgcgattgccggtttgaactacctgattcaaaacgccggtaaagacggtgtggaagaggtcatcatcggtatggcgcaccgtggccgtctgaatgttttggtgaacattttgggcaaaaaacccggcgatttgtttgccgaatttgaaggtcgtgccgaaatcaaactgcccagcggcgacgtgaaataccatatgggcttcagctccgatattgccacgccgcacggcccgatgcacgtttctttggcgttcaacccgtcacacttggaaatcgtcaacccggtggtggaaggttctgcgcgcgccaaacaaaaacgtttgggcgaaaacggccgcgacaaagtcttgccggtattgattcacggcgactccgcatttatcggtctgggagtcaaccaagcgacattcaacctgtctaaaacgcgcggttataccaccggcggtacggttcatatcgtcatcaacaaccaaatcggctttaccacttccgatatccgcgatacccgttcaaccgtacactgtaccgatatcgcaaaaatggtttccgccccggttatccatgtgaacggcgatgatcccgaacgcgtttgctttgctatccaagccgctttggattaccgcaaaaaattccataaagacatcgtgattgacgttgtctgctaccgtaaatggggtcacaacgagggcgatgatccgaccttgacccaaccgatgatgtacaaaaaagtatcgcaacaccccggtgcgcgtgctttgtacaccgagcaactgattgccgaaggcgtggtaacccaagccgaggctgacggttacatccaagcttaccgtgatgctttggacaaaggcgagcacgtcgagcaaacaacgttgagcaacttccaacgcacgcaaatcgactggagcaaataccaaggcaaagattggcgcgaacacatcgaaaccggtttgcctgccgcagatattgaacgtctcactgagaagtttaccgccgtaccggaaggctttgccctgcatccgactgcaaaacgtgtgattgaagcgcgtaaagccatggcatccggcaaacaggccatagattggggtatggccgaaaccttggcatacgccagcctcgtaaccaaaggtcacggcgtgcgtatttccggcgaggactcgggacgcggcacgttctcgcaccgccacgccgtattgcacgatcaaaaacgcgaaaaatgggacgacggtacttatgttcctctgcgccatatgggcgaaggcatgggcgagttcctggttatcgactccattttgaacgaagaagccgtgatggcgttcgagtacggctttgcctgctccgcacctgacaaactgaccatttgggaagctcaattcggtgacttcgccaacggcgcgcaagtgactattgaccaattcctgtcttcaggcgaaaccaagtggggtcgtttgtgcggtctgactaccatcctgccgcacggctacgacggtcaaggccccgagcactcttctgcacgcgtagaacgttggttgcaactgtgttctgagaacaatatgcaagtcattatgccgtctgaagcgtcgcaaatgttccacctcttgcaacgtcaagtcttgggttcataccgcaaaccgctggtgattttcatgtccaaacgcctgttgcgcttcaaaggtgcaatgagcccgctggaaaacttcaccgaaggttcgaccttccgtccggttatcggcgataccgcagaacgcgcaagcaacgacagcgtgaaacgcgtggtattgtgtgccggtcaggtttactatgacttggaagccggccgtgccgagcgtaaactggaagatgatgttgctattgtccgcgttgagcagctgtatccgttcccatatgacgaggttaaagctgaactggcgaaatatccgaacgcaaaatctgtggtttgggcacaagaagagccgaaaaaccaaggcgcgttctaccaaatccgccaccgcatcgaagatgttattagcgaagagcaaaaactgtcttatgccggtcgtccaagcagcgcatcgcctgcagtgggctactcaagcaaacacattgctcaattgaaacaattggttgaagacgctttggcattgtaaaccaagtagcattccgtctgagtctgctcagatggaatgcccatatgcagaattaaaaacacacaacaggccgtctgaaagggccattggagacacaaaatgattattgatgtaaaagtacctatgttgtctgaaagcgtatctgaaggcacgctcttggaatggaagaaaaaagttggcgaagccgttgcccgtgacgaaatcctgatcgatatcgaaacggacaaagtggttttggaagtaccttctccacaagccggcgtattggttgaaatcgtagctcaagacggtgaaaccgttgttgccgaccaagttttggcgcgcgtcgatacagctgctactgccgctgctgaagccccagccgccgctcctgcagaagctgccccagctgccgctcctgctgctacacaaaacaacgccgctatgcctgctgccgccaaactggctgccgagaccggtgttgacgtgaacgcattgcaaggttccggccgtgacggtcgcgtattgaaagaagacgtacaaaatgccgctgccaaacctgccggagccgctgctcctgctgttgcacttcctgccggcgcacgtcctgaagaacgcgtaccaatgagccgcctgcgtgcccgtgttgcagaacgcctcttggcttctcaacaagaaaacgccattctgactacattcaacgaagtcaacatgaaaccaatcatggacttgcgtgcgaagtacaaagaaaaattcgagaaagaacacggcgtgaaactgggctttatgtccttcttcgttaaagccgctgttgccgccctgaaaaaatacccggttgtgaatgcttctgttgacggcaaagacatcgtgtaccacggctacttcgacatcggtatcgcaattggcagcccacgcggtttggttgtgccaattctgcgtgatgccgaccaaatgagcattgccgacatcgaacaagcaattgttgattacgcgaaaaaagccaaagacggcaaaatcgctatcgaagatctgaccggcggtacattcagtattaccaacggcggtactttcggttctatgatgtctaccccgatcatcaacccacctcaatctgcgattttgggtatgcacgccactaaagagcgcgctgtggttgaaaacggccaagttgttgtccgtccgatgatgtatctggctctgtcttacgaccaccgtatcattgacggccgcgaagctgtattgaccttggtagccattaaagacgcgttggaagacccggcccgcctgttgttggatctgtaatcgtttcagacggccttttatttgttaatgaaaaggccgtctgaatttttatagtggattaaatttaaaccagtacggcgttgcctcgccttgccgtactatctgtactgtctgcggcttcgtcgccttgtcctgatttaaatttaatccactatatttagatgtagcgtaatgtagtatcgtgctacaataggctcaacgaacgattgaggccgtctgaaacatttgattcgaatgaatcggcagatatggactttcagacggccttttcttaaaaccatcaaaacgcagtcattcaaaataaaaaagaaacaaaaagtatcgtttttattttgagatactgttaaaagcaaaggatgacacgatgtctcaatatgatgtagtagtgattggtgcaggcccgggtggatacgttgccgccatccgtgccgcgcaactgggtttcaaaaccgcttgcgtcgatgcaggcgttaacaaagcaggcaatgcccctgcattgggcggtacttgcttgaacgtaggctgtatcccttctaaagccctgttgcaatccagcgaacatttccacgctgcgcaacacgagtttgccgaacacggtatcactgtcggcgacgtaaaattcgacgcggccaaaatgattgagcgcaaagatgccatcgtgaccaagctgaccggcggcgtcaaattcctgttccaaaaaaataaagtaaccagcctgttcggtacggcttcctttgccggtaaaaatggcgatgcttaccaaatcgaagtcgataacaaaggcgagaaaaccgttatcgaagccaaacacgtcatcgtagccaccggttccgtaccgcgtccgctgccacaagtcgctatcgacaatgtgaacgtattggacaacgaaggtgcattgaacctgaccgaagtacctgccaaactcggcgtgatcggttccggcgtgattggtttggaaatgggttccgtatggaaccgcgtgggtgcggaagttaccattcttgaagccgcgccgactttcctggctgccgccgaccaacaaatcgccaaagaagccttcaaatacttcaccaaagagcaaggtctgagcatcgaattgggcgtgaaaatcggcgacatcaagtctgaaggcaaaggtgtttccgttgcttacgaaactgctgctggcgaagccaaaaccgaagtattcgacaaactgatcgttgccatcggccgtattccaaacaccaaaggcctgaacgcggaagccgtaggcttggaaaaagacgagcgcggctttatcaaagtagatggcgaatgccgtaccaacctgcctaacgtatgggcaatcggcgacgtggttcgcggcccgatgttggcacacaaagccagcgacgaaggcgttgccgttgccgaacgcattgccggtcaaaaaccgcatatcgacttcaacaacgtaccgttcgtgatttacaccgatcctgaaatcgcttgggtgggtaaaaccgaagagcagctcaaagccgaaggcgtggagtacaaaaaaggtacttcaggttttggtgcgaatggtcgcgcattggcaatgggcaaagccaaaggtacggttaaagtgttggcagatgccaaaaccgaccgcatcttgggcgtacacatgattggtccggttgtcagcgaattggttaccgaaggcgtgactgcgctcgaattcttcgccagcagcgaagacatcgcccgcattatccatgcccacccaaccttgtccgaagtggttcacgaagctgcattggcggccgacaaacgcgctttgcacggttgatagacattaaggccgtctgaaatttttcagacggccttaaggccttcgacaaattgaatgttccgagagctccgttttctgatttataattccgtcagacaaacaaacagcatttacattcattatgaacaaagaaatagtcggtattttctttataccggcgggcatcatcagcatgtgtatggccgcattgtggcagatgtatgtgatgatgaccgaaacttatacgctcaaccgtttcaaagataaagaattggtttggcgcgtggcattgttgtttatcagtttcagccttgccgtttatctgctctgtccgaattcgcgtaaaaaaggcatcgtcttttttattctcgggggaggcggtgcagccatgtatctgctggcgcggatgtggttgcctttcagcaagtgaaacgacgattttccgaccgccgaaaggtagtctgaaacgcacgggcttgccatttggaggcagactcggggcattccactaatctaaaggagaaatccatgaatttacacgagtatcaggctaaagaactgctggctagctacggtttgcccgtacaaggcggtattttggcacacaacggcgaagaagccgctgcagcttacgacaaattgggcggcaaattcgctgttgtcaaagcacaagtacacgccggcggccgcggtaaagcgggcggcgtaaaagtcgttaaaagccgcgaagaagctaaagaagtggctgaaagcctgattggcaccaacttggtaacttaccaaaccgatgccaacggccaacctgtcaacagtgttttggtttgcgaagacatgtatccggttcaaaccgagctgtacttgggcgcagtggttgaccgttctacccgccgcattacattcatggcctctaccgaaggcggcgtggaaatcgaaaaagttgctgccgaaactcctgaaaaaatcttcaaagtaaccgttgatccgctggtcggcctgcaaccttgccaagctcgcgaagttgcgttccaactgggcttgaaagacaaacaaatcaacgagttcgtcaaactgatgaccggtgcgtacaaagcgtttgtcgaaaatgacttcgccctgtttgaagtcaacccgctggcagttcgcgaaaacggcgcgctcgcctgcgtggacggcaaaatcggcatcgacagcaacgcgctctaccgcctgccgaaaatcgccgaattgcgcgacaaatctcaagaaaacgaacgcgagttgaaagcttctgaatttgacctgaactatgttgccctggaaggcaacatcggctgtatggtgaacggtgccggtttggcgatggccactatggacatcatcaaactgaaaggcggccaacctgccaacttcttggacgttggcggcggcgcaaccaaagaccgcgtggttgaagcgttcaaactgattctggaagacaaatccgttcaaggcgtattgatcaacatcttcggcggtatcgtacgttgcgacatgattgcggaagccatcgtggcagccgttaaagaaatcaacgtcaacgttcctgtcgttgttcgtttggaaggcaacaacgccgaactcggcgcgaaaatcctgaacgaatcaggtctgaaactgacttctgcagacggcctgaatgacgcagccgaaaaaattgttgcagccgtaaacgcctaaggagaaaagaatgagcgtattgattaataaagacactaaagtattggttcaaggtttcaccggtaaaaacggtactttccactccgaacaagctctggcttacggcactaaagttgtcggcggcgttaccccgggcaaaggcggtcaaacccacctgaacctgcccgtgttcaacaccatgaaagaagccgttaaagaaaccggcgcggatgcatccgtgatttacgttcctgctccgtttgtgttggattctatcgttgaagcagttgattcaggcgtaggcttggtcgttgtgattaccgaaggcgtgccgactttggacatgctcaaagccaaacgctacttggaaaccaacggtaacggaacacgtttggtcggccctaactgcccgggcgtgattactccgggcgagtgcaaaatcggcattatgccgggccacatccatactcccggccgcatcggcatcatttcccgttccggtacattgacttacgaagccgtggcacaaaccaccaaactgggcttgggtcaatcaacctgtatcggtatcggcggcgacccgattccgggtatgaaccaaatcgacgcactgaaacttttccaagaagacccggataccgacgccatcatcatgatcggtgaaattggcggtactgcggaagaagaagcagccgaatacatccaatccaacgtaagcaaacctgttgtcggctatatcgccggtgttaccgcacctaaaggcaaacgcatgggtcacgccggtgcgattatctccggcggcaaaggtactgcggaagaaaaattcgccgctttcgaaaaagccggtatcgcttacacccgcagccctgccgagttgggcactaccatgctggaagtgttgaaagcaaaaggtttggcataatcaggtttgacaactgattgaacatcaaatgccgtctgaaaccggaaatcgggtttcagacggcattttgtttgtcatttcaaaaagaggcagcctcaacatacccacattatttttgcccttttggggcagtcagagacctttgcaaaattccccaaaatcccctaaattccctaaattcccaccaagacatttaggggattttggggaattttgcaaaggtctcgggctaagtgtgcctgtttgcgcctaaaaggcggcccggatgcctgattatcgggtatcctgggaggattaagggggtattggggtaaaattagtggatatttgaaacgaaaacagccgaaaacctgtgtttgggtttcggctgtcgggagggaaaggaattttgcaaagctctcgtattggctttgaagttccgtgtaattcacaggtagggcgtgtggcacagccacgcacgcggtcggttgggtatgcaggctacggctttctctgttgaaactgcaacacgtcagctaccaaccgtgtgcgtagcgcacacggttggttgggatacaagttactgtttgttcttaaatggagtaccaacatcaagggcttttgataatcctgaaaatattaaatattcagtttcagtttttattttaggagaaatatttgcataatttctatctttaaagcaccaatggatatatggtttcgtttcatcttctgggttatctaaataagcaataacattcaagtcaaataaaaattgcaaaaactcattagcagtactcataaatttaggtatttccactgatgttgtttgtaagtgctttttcaaacgttcaaatgcttttaaaaaatcactatatttaaatctatctttcccgtttaaaaattcaaaaaatttcaggaaattttgataatcactttgactataataaaacaaaagatgatctttgatttcaccaagtaaatatatcgagtattctctttgaaaagaagtattatcaaaatcttctgctacgacataatcttccttacttttcttatttttttgtagcaaagtaagcatctgaagaatatcgcgaggtcgataatacgattttcttaggaagctaataaatgaagttaaatttttatactcatcatgtaaattaggagcattccatggaaaataataatcccatgagttgcctttttctaaactatcttgtttttcttgctgggttctcaaaagatgatcaaaaacgccaaaaatctttgaacttctataagatttataatccgtcctccagtctaaaaatactgaattatcttgaagtttggtattttgattttgtaaacctaatgaatcaaagatatcaggtctaatcaataacacaactctcatccttcccttactatctttaatggaagggaagatatcattatttaacatccatatggcgttagcaagaccttttacacactcatgatattcatcaaatggaatctgtgatggtctaatatctatcccatcaataaacaaaatatgattatcttttagctttaactgagataaagcatctttaaattttctttcaataaaacctaaatttgcttggaatttactttctgtaaaagttatttgttgggattcctcttcacctagtttaacaaattttccaaaaatcatttccgcagcttcttttgaattttctattaaagttattgcttgtacaatttccggatcaaaagcgccataataatattcatttatagcctcatctaaggctttaaatttattaaatattgaagataatattccgttttctttacatttgatttgatttgatatcaacagatataaaatgactttccaaatacttgtaaaatctgaaacagttaagtgtcttgctttctttagctgaataaattttgaataatcggtttcacgaacaaacttagtagtggcatgtatgtttttatagaagttattagttaaataaacagcatatgctgtctttccagttcccttttctccgattaaaaacgaaatatttggttcacataattcatccaaatattctccttttacaaatattcggttaaataaatctttattttctcttcttctgtagtttgcagcatccacaaatccaaattctaatgtttttaacggtttcatcttaataatctcctatttaattttgaattaaacttacctcaaaaccaccttcaaatacttcccagtataactccccttaactttcgccacctgttcaggactacctttagcaataatcctccccccgccatctccgccttccggccccaagtccacaatccaatccgctgttttaatcacatccagattatgctcgataatcactatcgagttgcctttgcctttcagacggcctatgacttccagcagcagggcgatgtcggcgaagtgcaggccggtggtgggttcgtcgaggatgtagagcgttctgccggtgtcgcgtttggagagttccaaggcgagtttcacgcgttgggcttcgccgccggagagggtggtggcggactgtccgaggcggatatagcctaggcctacgtccatcagggtttgcagtttgcgcgatacggtggggacggcgtcgaaaaattcgcgggcttcttcgacggtcatgtcgaggacttggctgatgtttttgcctttgtattggatttcgagcgtttcgcggttgtagcgtttgccgtggcagacttcgcaggggacgtacacgtcgggcaggaagtgcatttcgactttaatcacgccgtcgccttggcaggcttcgcagcggccgcctttgacattgaaggagaatctgccgacgttgtagccgcgttcgcgagagagggggacgccggcgaagagttcgcggataggggtgaacaggccggtgtaggtggcggggttggagcgaggagtacggccgatgggggactgatcgacgttgatgactttgtcgaggtgttcgaggccgtggatgtcgtcgaatggggcgggttcttcttgggcgcggttgagttcgcgggcggtaattttggcgagggtgtcgttaatcagggtggatttgccgctgccggacacgccggtgatgcaggtaatcaaaccgagcggcagctcaagggtaacgtttttgagattgttgccgcgtgcgcctttgaggacgagcatccggtcgggattgacgggcgtgcgttcagacggcacggcaatggattttttgccgctgaggtattgtccggtaacggagttttcgcattgggcgacgttttcgggcgtgtcggcaatcagtacgttgcctccgtgttcgcctgcgccggggcccatatcgaccacgaaatcggcttcgcggatggcgtcttcgtcgtgttcgaccacaatcacgctgttgcccaaatcgcgcaggcgtttgagggtggccagcaggcggtcattgtcacgctggtgcaggccgatggagggttcgtccagtacatacatcacgccggtcaggccgctgccgatttggctggcgaggcggatgcgctgggcttcgccgccggagagggtttcggcggagcggcttaaattcaggtaatccagcccgacgttaatcaggaagccgaggcgttcggtgatttctttgaggattttttcggcgatttgttttttgttgccgtctaaatccagtgtttcaaagaattggtgggttttggtgagcggccaggcggaaacttcgtgcaacggctcaccgctgacgtaaacgtagcgggcttctttgcgcaaacgtgcgccgccgcagcttgggcaggcgcggtggttttggtattcgcgcagtttttcgcgcacggtttcgctgtcggtttcgcggtagcggcgttcgagattggggatgatgccttcaaaggcgtggctgcggttgaaggtggtgccgcgttcggacaggtaagtgaaatcaatgacttctttgcctgagccgtgcagcacaacttttttcactttttcaggtagtgtttcccaagcagcctgcacatcgaaaccgtaatgccgcgccaatgattgaatcatttggaaatagaattggttgcgcttgtcccaaccgtcaatcgcacctgttgccagcgacaattcgggatgggcgaccactttttcggggtcgaagaaattggtgttgcccaagccgtcgcaagtcgggcaggaacccatcgggttgttgaacgaaaaaaggcgaggctctaattcgggcaggctgtacgaacacacggggcaggcgaaacgtgcggaaaaccaatgttcttcgccgctgtccatctccatcgccagcgcacgctcgttgccgtggcgcagcgcggtttcaaaactttccgccagccgctgcttgatgtccgccttcactttcacgcggtcgatgaccacgtcgatattgtgcttgatgtttttttccagcttcggcacttcgtccaactgatagacctcgccgtccacgcgcacccgcgcaaaaccctgcgcctgcaagtcggcaaagaaatcgacaaactcgcccttacgctcgcgcacggtgggggcaagaatcatcacacgcgtgtcttccggcagtttcaatacggcatcgaccatctgcgatacggtttggctcgacagcggcagcttgtgttcgggacaatacggggtaccgacacgggcgtataaaagacgcagatagtcgtggatttcagttaccgtaccgacggtggagcgtgggttgtggctggtggatttttgctcgatggaaattgcaggcgacagaccttcaattaaatcgacatcgggtttgtccatcatctgcaaaaactgccgcgcataggcggaaaggctctcgacataacgccgttgcccttcggcatacagcgtgtcaaacgccagcgacgacttgccgctgcccgacaatcctgttaccaccacgagtttgtggcgcggaatgtctaaatcgatgtttttcaaattatgcgtgcgcgcgccgcggatgcggatggtgtcgttgtcgtgcgaatgttggggatgatggttgcacataatggatgccgcctgaaaaataaaggaaaaccggtattgtagcactttctcggatgccgtctgaagccgcgttcagacggcatttgccagcggagtacggcagattccgctataatgtcggcaattttaacccgcttgaacaaaaggatgacaaatgaaccgtctttacccccacccgattatcgcccgtgagggctggccgattattggcggcggtttggctttgagcctgctggtgtcgatatgttgcggctggtggtctttgccgttttgggtgtttaccgtatttgcattgcagtttttccgcgaccctgcgcgtgagattccgctaaatcctgaagcggtgttgagcccggttgacggccgtatcgtggtggtcgaacgcgcacgcgatccgtatcgtgatgtcgatgctttgaaaatcagtatttttatgaacgtgttcaacgtgcattcgcaaaaatcgcctgccgattgtacggtaacgaaagtggtctataacaaaggcaaattcgtgaatgcggatttggacaaagccagcacggaaaacgaacgtaatgcggtgttggcgactacggcttcaggtcgtgaaattacttttgttcaagtggccggtttggtggcgcgccgtattttgtgctacacccaagcaggtgcgaaactgtcccgcggcgaacgttatggctttatccgcttcggttcgcgcgtggatatgtatctgcctgtcgatgcgcaggcgcaagtggcgattggcgataaagtaaccggcgtcagcactgtattggcgcgtttgccgctgactgcgccgcaaactgaatctgagcctgaatctgagcctgctttacaaactgctccggttgaaacagcggcaaacccatctgccgaacaacggcaaatcgaggcagcggcggctaagattcaggcggctgtgcaagatgtgttgaaagattaattttgcggactgaaatagaaaatatcagtaccatcattcacacgaatgaggaagtttggttttttgaatttttgctaatgttcacaccgtcattcccacgaaagtgggaatctagaaacttaacgttacgacgatttatcggaaacgactgaaaccggacggactggattcccgcctgcgcgggaatgacgacttattagttacctaacacttaaaaaacagaaacctttccgcgtcattcccacgaaagtgggaatccgggaacttaacgttacagcgatttatcggaaacggctgaaaccgaacgaattggattcccgcctgcgcgggaatgacaactcattagttacctaaaacttaaaaaacggaaacctttacgccgtcattcccacgaaagtgggaatccgggaacttaacgttacagtgatttatcggaaacggctgaaaccgaacgaattggattcccgcctgcgcgggaatgacaactcattagttacctaaaacttaaaaaacagaaacctttacgccgtcattcccacgaaagtgggaatctagaacccaaatgctaaggcgatttatcggaaacggctgaaaccgaatgaattggattcccgcctgcgcaggaatgacaactcattagttacctaaaacttaaaaaacagaaacctttacaccgtcattcccacgaaagtgggaatctagaacccaaatgctaaggcgatttatcggaaacggctgaaaccgaatgaattggattctcgcctgcgcgggaatgacgacccattagttacctaaaatttaaaaaacagaaacctttccgcgtcattcccatgaaagtgggaatctagaacccaaatgctaaggcgatttatcggaaacggctgaaaccgaacgaattggattcccgcctgcgcgggaatgacgggatcttgggtttctgcttttgatttttctgcttttgcgagaatgacggcgtgaaagtaagaatgatgaaacaaaaaaaatgggaatgatggcatagtggtttgttctttgtctttgccatatttcctaacaaattgattaaaaagaaaaaaggttttcagaatgccgtctgaaaaccttttttgtttgcctgtccgattttaaaacttcacgttcacgccgccggtaaagctgcggcccatttgcggcgtatcagagagaaagctgctgtgggcgtaaacggattggttgagcaggttgtcggctttgacgtaccaattccactcgccatagcgcgtattgcggcggtagtttgcgccgaggttgagcatatggtgtccgggcgtgcgcgtttcgtagcgggcgagtttgttttgggcgaacacgcggtagtagtccaaattggcatcgatacggtcggtcagcgaggctttcaggtggaagccgaggcgcgcagccggaacacggggggcattttggtcgtcctgtgcgatgaaaggacggttgccgtaggcatcttctctgccgggtagggaaggcaggtttttcagacggcctcgtacatagtcgccggaaacgccgatgcggtagcgsggtgtcggtttgaagtagatttcgccttccgcgccgtagaagtcggcgccggattggttgtagcgcacgagcttcatttcgctgtcgtcttcgatggatttggggccgcgtccgtcgtttaaggtttgggcgtaaatgtagttaccgaagcggttgcggtagagtgccagattgtattgccagcggtcgccttcgtagcccagcgcgagttcgatattgttggaacgctctttgttgaggtgtttgttgccgacttcaaaggtgttggtggcgacgtgtttgccgtgtgcgtacagctcttgcgttgacggcaggcgttcctgatgggaggcggtcaggctgagtttgtgttgtggcgtgaaataccagttgcccgaaagtgcgaatgagcgggcggtttggcggtgcgcgccgaggtcgggcagggggtggttgtagtagttttcccgatcaatcaatgctttgtcgtactgaatggaggctttttgtttttccacgcgtacgcctccttcaagcgtgaagttgtcccagtttgcctgttctacaccgaaaaagctgtaatgttgcactttgttgtcaagcagcatcggttgtttaaccgcttcggatatggcagataaagcactggatttttgttgtaaatattgcacgccccagctgcctttcagacgacctatgggttggtggcgcaactcgatgcgggcgttttgcgtttggttgttaaaaaagttttcgactgcatcgcctgctttttcgtcgtggcggtagtcgttgcggttcaggtgtacgcgcagggcttcaaaaccggggaacggttgcttccattcggcacggagttcgtagcgtttgttgcgcaggtctatccacggtctgccgctgtgggtgtgtgcgtgtgcattatcgtcgtcgtggaagccgcagctcaagcccggattgtcgtaatcgatgtcttcttcggtcaacaggtgcggataaagctgtaaatagcgtttgttaatcaagctcttttgccagatgatgtcggcgtggcaatcatcgtattcgtggctgtgggcaggcagaccatattggtcgcgacggtcgctgtacgctacgccgataaaacctttttcgccaacccaagacagcccgatgctgcccgtttgcgaatcggcgtggctgtcgggcaggcgtttcagattgcggtaacgcggtacggcgtaatcccccgatttgcggtacagcccttccgtgtgcaatacaaagtttttgcccaaaccgatattgatgccgccggacgtgagtttttccagattgccgctgctcaaacgcaatccgagttcgcccgatacgccgttttcaggcattttttcggggattttgccatcggcaacatcgaccagccccgccacattgcccgagctgtacaagagcgtaaccggcccgcgcaggatttcgacctgttgcgacaaggcggtatctaccataatggcgtgatcgggcgaaaaatccgccatatcgcctgtttcgccgtgatggttcaacactttaayccgcctgcctgtttgaccgcgaatgacgggagcagacgcgccgccgccgtattgcgaagcgtggatgcccggtacgccgtctaaagcgtcgcccaagttgacggctttttggcgcaaggtatcgccggagatgattttgtcggaggcggtcgaagtgtgcaacagccccgacgtggcgcgcggacggcttttgccgacgacgctgaccgtttccaaatccaccgattgctcagtttcatgcgcttgggcgaggaggggtgtgttgattaaaagaattgataaaacaatgggtttgagtgtagtttgtgccattttggcttctcgtcgcatttcaaaagtttgttattatataacattacattttttatatcataagattttgagaacactcagagggcataggcaaaagtttttcaaatgaaacggttgcggcatcgggcggtgtccatttgtatccgccgtccttcgggggcgcggttgatgttgacgcagattccgctgtgtttgcccattatgttcggctgcgggataaccaaaatttatgagtgcataaaaacggcacgttcccgaacggtcgaaaaggtggcaaaatggcgtacttgtcagaacgcgaggctctgcgccaggttcacgagggcgcatcgggcacgctaagatataagagggtatggatgggggtatcggaaatgcagttaataacaaacaaattataaatcaataggttaatcacaaaatgcttttgtttatcgacaattacgacagttttacttacaacatcgtccagtatttcactgaattggggcaggaagttgccgtgcgccgcaacgatgatattacgttggaggaaatcgaggcattgaatccgcaatatctcgttatcggccccggcccgtgttcgcccaaagaagcggggatttccgtggcggcgatgcgccatttcgccggccggctgccgattatgggcgtgtgcctcgggcatcagacgataggcgaggcgttcggcggcaggatagtccgcgccaaaacgctgatgcacggtaaggtgtcgcccgtgtcccattcgggcaagggtatgtttaagggtttgcccaatccggttacctgtacgcgttatcacagcctcgttatcgatcggaatacgatgcccgaatgtttggaagtaacggcttggactgaggacggcgagattatgggtgtgcgccataaggaatatgccgtcgagggcgtgcagttccaccccgaagccctcttgaccgagcacggacatgatatgttaaacaattttttaatcgaatttcaaaacttcaaaccgcaaaaaatctgacgtgatgccgtctgaagcccttcagacggcattttcgtccgaatattgaacggaggacaaaaaatgattacaccgcaacaggccatcgaacgattaatcagcaataacgagttgttttacgatgaaatgaccgacttgatgcgtcagattatgagaggacaggttctgccggagcagatagcggccattttgacaggattgcgtatcaaggttgaaaccgtttccgaaattaccgcagctgcagccgtcatgcgcgagtttgcgacaaaagtgccgctggagaatgcagaggggctggtcgatatcgtcggtacgggcggggatggcgcgaaaaccttcaatatttcgacgacttcgatgtttgttgccgcagcggcaggcgcgaaggttgccaaacacggaggccggtcggtctcttcctccagcggtgcggctgacgtggtggagcagatgggcgcaaacctcaacctgactcccgaacaggttgcccaaagtatcaggcagaccggcatcgggtttatgttcgcgcccaatcaccacagtgccatgcgccatgtcgcccctgtacgccgttcgctcggtttccgaagtattttcaacatattgggtccgttaacgaatcctgcgggcgcgccgaaccagcttttgggcgtgttccacaccgatttgtgcggcattttgtcgcgggtcttgcaacaacttggttcaaaacacgttttggttgtttgcggggagggcggtttggatgaaattacactgacgggcaaaacacgcgttgccgagctcaaagacggaaaaatcagcgaatacgacatccgcccagaagatttcggtatcgaaacccgccgcaatttggatgaaatcaaagttgccaatactcaggaatctttgttgaaaatgaatgaggtgctggaaggaagagaaggggctgcgcgcgatatcgtattgctcaacaccgccgccgccctgtatgccggaaatgtcgctgcttcgctttcagacggcatatctgccgcacgggaagccatcgattcaggcagggccaaatcgaaaaaagaggagtttgtcggttttcaaccacaacaaagatgccattttcttggaaagatggagcttgggtgatgccgccatgattatggaacttttgtggcaaaacataagcacttcacgaagagaacttaccaaactgtttttatataaaaacttggggctgtactagataaccagaccaaattcccattaactaattgtcttaaaatctgaatttgagattctatttaaaatgccattggcatttctttaaatgcagccccaaatgctctttgggaatgccgttaaacttacgtaaatggctaaattcactaatatcaagcacatcataactacgaaaggtatccgtgtatacaatgccatcaggcttaactttctttcggataattggcaacaatgtcgctgattgcgcattaggaacaacgacggtataaaccttatatattgcgtccctaagaagggacgattaacaaaaattaacgtcctttactttctacaagtaacagggcttttttttgcccgtttttgaggattcgcaccatggaagataagcaagggatgacaaaggcggttgccggcgtgatgacggacgcgctagcggacggcaggaagccgacaaccgcttcaaatcttccccccttatctaacagggggggacagaaaccgaaacggcaggcagggttcaggaagtcttcgaatgttacgaaacgtacataacggacggtaaaggaaacctgttaggcgttcctcttcggcgcggtgtatcagattcggctttcattgatcaaattagcttttcatttcatgaaaaaacctttttcgataaatacggcgttcgtgtaagtcttttggaagacgaagattttattcgcgccgcgtccatgctcgccgaagaagttttcggtttcggtatctacaaagaatccaaaggttcgggcggtcgtttctatgagcgctgttggttgatgggttcggaagacgccctatacggtcgcgtccattttggcggccaacaaaataccattcttttcgaactgaccggcaccggttgcggcgtcgcaaaagaaggctgggaatcacgacttttcgcattcctgactaatgcaatccgcccaaaaatcacacgcgttgacatcgcaaaagactttttcaacggcgaatacagcccgaaccaagcccgtgaagaccgaaataaaggtatgtttacctgtcatcacgtcaaaccaaaaggcgaatgtttggggtcagattgggaagaagacgatgaagccaaaatgaccaaaggcaagacctatggtatcggctcccgtgaatcgtccaaatatgtccgcgtctatgaaaaaggcaagcagttgggcgataaaacaagcacatggacgcgatttgaaattgaattcaaagcaaaagacatcgttatccctttcgaagttttgcagaatccgggcgaatatttcggcggcgcatatccgatttgcgaacgattcgcccaaaaggcaacgcgcatacacgcggttaaggaagataaggtcatttcagccgaccgctaccttgaatgggtaaaaaaacagttcggacgtgcggcaaacggtctgaaattcatttttcccgaattggacaaagccaaactgtttgaactgattgagccgagtcatcacaagctgcccaagtctttggctcccgaagcctacgactgcgcctttttgaaagctcaagccattcatgaacagcccgcattcaaaccgtacaaagacccttactatatgtacgaatattacgagaatcttgaaaaacagcttgaacagcaaaaacacgtcaacaatgaagaaagctataacaacttcatttacgacaaattcgcaagactaccgatttcatgggcttaaagtgtctgcccgaaagacgtttaatcacacaaggaaaccaaaaaatgaacatccaacttcaaggccacatcgtcggcgttaaaaaaatcaacggacaaatcgaaggcaagagcttcgactattgctgcctgattgtcgccacacccttagacagctcccaaggcaacgcattgggcagctctactactgaatacgatttcggcggctctgccaatttcgagcagttccgaaacgcccaatttccgatcgaagcaaacctgaacgtagaaatcgtcactacgggcaaaacccaaaaactgaaagtcatcggttttcaactcgtgaagaaaggctgattgaatgcagaaagtctatgttgtccagtccgtatcaacaggggactttctgtatctctctcctgaaacgggcgacatcggacataccaaattaatcaccaatgccgattatttctacgacttcgaagaagcgattaacgcaggtttggaagaaatcggcaaccaatacgaatttgtcgtattcggatttttgaaagactgattttcggatgttcggcggtcgtctgaaaaacgctccatccattaccgccaaacactttttgaaggaaaatatcatgaaatttattaacacctgccgtaaatacggcgcaaaactggctgttgtaacagctgctcccctggctttggccgcacatgcaaatgcaacgttgcccgatacggcaaaaaacgctttggaagccgcaaaagcggacggtatggaagccggttggattgtagtgggcattttcgccgcgctttttgtattttccatcgttaagagagtgatgaagtaagacggcatgtactaccaagtcggaaataaatgtcttgagaagcaccaggctgaaaacctttatttcagcttggtagtaccaagaatcaaagaaaacggacagattgtcaggccggaatataacggcagcctgtggaagatgtcggacggtcagccgctaaggcttttattggcggaatgcagtccgaaagacaacctgcaaagcggtcttgaaacaggctggatagtattcggcatcctcgcgtccgtttactttgtttccctgctgaaaaaggttttgaaatgatggatttttatttttatctcggcgtttccgtacccgtattaatcggggcggttctgtttaagaattgagcgcatgaagttatggtgtcaaaatcaggctttcaaaacaatcattgaaaggcagaaccatgaacaagccgtttatcactcaggcgcagttggcactttataaatatcagccgtccagcaagtattttgggcaatcgatggcggttatagcgcaatctgaatttgttgaatttgcgaagattaataagtctgaaaatgttattgattgtttctcttttttctggaatagaagaattaaacatgatatttggctaatctcattttctgataattcagaaatggtaattaaagaatccctgaaagatggtcataaaatatacaaatttgaattttgcgaaattgtcgataattgcaattttgatgatgtattcgtttgaagcgaatgcaaatgcagtaaaaatatctgaaactgtttcagttgataccggacaaggtgcgaaaattcataagtttgtacctaaaaatagtaaaacttattcatctgatttaataaaaacggtagatttaacacacatccctacgggcgcaaaagcccgaatcaacgccaaaataaccgccagcgtatcccgcgccggcgtattggcgggggtcggcaaacttgcccgcttaggcgcgaaattcagcacaagggcggttccctatgtcggaacagcccttttagcccacgacgtatacgaaactttcaaagaagacatacaggcacgaggctaccaatacgaccccgaaaccgacaaatttgcaaaggtctcaggctaagtgcgcctgttgccgcctaaaaggtaccccggatgcctgattatcgggtatccggggaggattaagggggtatttgggtaaaattaggaggtatttggggtgaaaacagccgaaaacctgtgttggggtttcggctgtcgggagggaaaggaattttgcaaaggtctcttttcgtcattcccgccacttttcgtcattcccgcgaaagcgggaatctagaatctcggactttcagataatctttgaatattgctgttgttctaaggtctagattcccgcctgcgcgggaatgacgatgcaggtatttctgacgattcccggctatgatgttgaggcagaaatcgaaaaattcgtttggatggatgctgtgatttggcagatgccgggctggtggatgcacgagccttggacagtgaaaaaatacatagacggagtattaaccgctggacacggcaaactctaccaaagcgacggcagacacagcgtcaatccgactgagggctacggcacaggcggcttgttgcaaggcaaaaaacatatgctttcactgacttggaatgcgccgattgaggcgtttacccgcgaaggcgatttctttgaaggcaaaggcgttgatgttttgtatatgcacttccacaaagccaacgagtttttgggtatgacccgcctgccgacattcttatgtaacgatgtggttaaaaatccgcaagtggaaaaatacttggcagattatcaggcacacttggaaaaagtgttcggctaattaaaaatccatcttcaacacggagatggattttgtttgtttcgttgattttgtgtcagtttcagatgtaggtgcttattcggacgggccgtctgaaaatgtttgccccaatgcaaaaaaatcactgcaaaccttcataaacggggtttgcagtgattttttcaaatcaaacagattgaaaacctgcgccgaattgttcagacggcattattttttcagttcggacagaatgtcatctacggttttcttcgcatctccgaaacacatcacgctgttttcgttgaagaacagtgggttttgtacacctgcgtagccggtattcatcgagcgtttgaagacgacgacttcttttgccttccacacttccaacacgggcatacccgcaatcgggctgttcgggtcggtttgggcggcggggttgacggtgtcgttcgcaccgatgaccaagaccacatcggtttcggggaagtcgtcgttgatttcgtccatttccaaaacgatgtcgtaggggactttggcttcggcgagcagtacgttcatatgaccgggcaggcggccggcgacggggtggatgccgaagcgtacttcggtgccgtttttacgtaaaagctcggtgatttcggcaacggggtattgcgcttgtgcgactgccataccgtagcccggggtaatgatgacattgtttgcgcctttcagcatttcggcaatatcggcagctttgacttctcggtattcccctatctcttggctgccggaagataatgtgccgctgtcgctgccgaaaccaccggcaattaccgagacaaacgagcggttcatggctttgcacataatgtaggacagaatcgcgccgcttgagccgaccagcgcgccggtaacgatgagcaggtcgttggagagcatgaagcctgccgctgcggccgcccagccggagtaggagttgagcatggacacgaccacgggcatatctgcgccgccgatggaggcaaccaagtgccagccgaatgcgagggcaatcagggtcataatcagcaggatgaagccgctgccgtcaatgccgacaaatacgagcagcaacacaaacgatacggcaagtgccagtgcgttgagcttgtgtttggcgggcagttgcagcgggctgctgctgattttgccgttgagtttgccgaatgcgaccagcgagccggtaaaggttaccgcgccgatgaagatgcctaaatacacttcgaccagatggatggtgtgcatatcgtgcgaaacgttgcccggcgcgatatagctgttgaagccgaccaaaaccgccgctaggccgacgaagctgtgcagcagggcaatcagttcgggcatttcggtcatttccacctttttggctttgtagatgccgattgccgcgccgatgagcatggcgatgatgatccagcccagtccgtgggtattgtcggaaaaaacagttacaaaaagggcgaccgccataccggcgataccggaatagcagccctgtttggcggtttcctgtttggacagccccgccagtgagaagatgaataaaattgcggcaacgatatacgccgctgttacgagtcctgaagacatagaaattctccgattttcgatgatttgttttcaatgccgtctgaaaaattgacgttcgtgttttcagacggcatctgtttcaagcagccgcgacaaacagcccgacggtgcaggcaaatccgcctgcccacatcagtgagcgcatagcggctttgtcggcgatatagcaccagataaaggcgaggcggaacaggatgaacaggcaggcaagcgtgttgatggtcgattgcgccgcattgccggttgcgtgtgccgtcaaaacggcggcggcaaacggtgcaaaggcttcaaaaccgttttgctgtgcggcgtgggcacgggcggctgcgccttgcgtgtgcgctagaaaaccgcgcggattgtggttgtctttaaaccggaatccgcccgcttttttggcatacgccgcacaaaaaagcggcaataggcaggcaatcagaatacaccaataggcgaaagtcatggcttaccctttcttaaacatattcagcatacgccgtgttaccgcaaagccgccgaagatgttgatgccggcaatcaggatggcaacaaacgacagcagcgaaacgaagccgttgccctgaccgatttgcagcagcgcgccgacgacgatgatgccggagatggcgttggttaccgacatcagcggtgtgtgcagcgagtggctgacgttccagacgacgtagtagccgatgacgcaggcgagaacgaacacgataaagtggttcaggaatgctgcgggtgcgaccgcgccgacccacagtaccaagacggcggcgatgacggcgggcgcgagttttttccacaggggaacgggttttggctcgggcttggcggcaggcacggctttttcagacggcgtttgctgcggctgggcggaaacttgaatcggcggaggcgggaaggtgatttcgccgtcgtgggtaacggtcatgttgcggataatcacgtcttcgaagtccaacgtgatttcgccgtctttgttcgggcttaacagcttggtcaggttgaccaagttggtggcgtaaagctgggaagactgtccggcaaggcggtttgccatgtcggtgtagccgatgattttcacgccgttgccggttacggacaattcgcccgggcgggtgagttcgcagttgccgcccgtcgccgccgccaaatcgacgatgacggagccggatttcatgctttccaccatttctttggtaatcagcttgggcgcgggtttgcccggaatggcggcggtggtgatgatgatgtccacttctttcgcctgctcggcaaagagcttcatctcggctgcgataaattcgtcgctcatcactttggcgtagccgtctccgctgccgcccgattcttgtgggaagtcgagtttcaggaacttgccgcccatcgattcgatttgttccgccacttccaagcgggtatcgaacgcgcgtaccactgcgccgagcgagtttgccgtaccgatcgccgccaaacctgccacacctgcaccaatcaccaaaacctgcgcgggcggcactttgccggcggcggtaatttgaccggtgaagaaacggccgaaggcgttggcggcttcaattacggcgcggtagccgctgatgtttgccatcgaagacaaagcgtccaaagcctgcgcgcgcgaaatgcggggcaccatatccatcgccagcgcgttcactttcttggcgcgcaaggcttcgaccaaagcctcgttttggcgcggccacaggaagctgacgatggtttgaccttcgttcaaaagcggcagttcctgttcggacggcgcgttgaccttataaatcaaagggcagacccaaaccgccgctttgtcggcaacggttgcgcctgctgtttggtaagcggcatcgtccaaacttgccgccaaacctgcaccgctttcgacaacggtttcaaagcccagtttgcccagcagggcgacggtggcgggcgtacaggcgacgcgggtttcgccggataatgactcgcgtgggataccgattttcatctctgaatcctttttcgggttgtttatatgtatcgtgggttaaatttaaatcggggcggggcggagcaacgccgtaccggtttaaagccgactcacttcaaatgttaatatattttagataatccccttataacgaattttcatcaggctggcaatagttgcggcattttcccgtgttgtccgacacatactgccgtttgtgtttgaaatcgttttccgattgcagtcccgcccgccgtaacattctttgccgtttcactatataatccgcattttttgagccgccgttatgccgcacgccctcgtcctccaatttccctccgccgcagccctgccttccgacttccccttacgcctgcccgaacctgattgcgccgatgaaaagcgtatgcgttttatcgttgaagaagggttttctttaagcgaaaaagacgcggcgttgcttggcagccgtcaaatcgaccacgccgtgttgccggatatggatttcgacgaactcggtttgattgtcagcgatatggattcgacgctgattaccatcgaatgcgtcgatgaaattgcggcaggcgtgggtttaaaaaacaaagtagcggaaattaccgagcgttcgatgcgcggcgaactcgatttcgaacagtctttacgcagccgcgtcgcgctgttggcgggattggacgaacgggttttggcggacgtttatgaaaacgttttgaagctctcgcccggtgcggaatttttgttggacgaatgcaaaaggcacgatgtgaaattcctgctggtgtcgggcggcttcacgttttttaccgaaaggctgcaacaacgcctcggcttcgaataccaacacgccaatgttttggaaattgaaaacggcaggctgaccggccgtctgaaaggcagaatcatcgacgcgcaggcaaaggcagatttgttgcgcgaataccgcagccgcctcggattgcagccgcatcaggtgttggcggtgggcgacggtgcgaacgatattccgatgctcaaagaagcgggcataggcgtggcttaccgtgccaaaccgaaagcgcgggccgccgccgatgcctgtatcaacttcggcggtttggagcgtgtacgcggcctgttcggataggcggataggaaacggatgtcgtccgaaaggttttcagacggcatttgaacggcaggaacgacagtgggacgcagaaaactttggtttgccctggcagcagcgggcgttatcggcggtttggtcggcattgtgctgacggaactgatgcacttcatacagcatacggcatacggttatggcgcggacggcgtgtacacttcgttccgcgaaggcgtggcacaggcttccggtatgcggcgcgttgccgtgctgacgctgtgcggcgcggtcgcaggcagcggctggtggttgctgaaacgtttcggcaagccgcaaatcgaaatcaaagccgccttgaaacagccgttgcaggggctgccgtttctgacgacggttttccatgttctgctgcaaatcataacggtcggactcggttcgccgctcggacgcgaagtcgccccgcgcgaaatgaccgccgcgtttgcttttgccggcggcaaacgcttgggtttggatgaaggcgaaatgcggctactgattgcttgcgcttcgggtgcgggtttggcggccgtgtataacgtgccgctcgcctccacacttttcattctcgaagccatgctgggcgtgtggacgcagcaagccgtcgccgctgcattgttaacttcagtcatcgccaccgccgtcgcgcgcatcggcttgggcgacgtgcagcaatatcatccggccaaccttaccgtcaatacttcattactttggttttccgccgtcatcggcccgatactgggcgtagccgccgtctttttccagcgtaccgcccaaaagttcccctttatcaagcgcgacaatatcaaaattattcccttggccgtctgtatgtttgcactcatcggcgtgatttccgtttggtttcccgaaattttgggcaatggcaaagcaggcaatcaactgacctttggcggattgaccgattggcaacacagccttgggctgaccgccgtcaaatggctggtcgtcttaatggcgcttgccgtcggcgcatacggcggtctgattaccccgtccatgatgctcggcagtaccatcgcctttgctgctgccaccgcgtggaacagtgtttttcctgaaatgtcctctgaaagcgcagccattgtcggcgccgcagttttcctcggtgtttcccttaaaatgcccctgaccgccatagcctttattttggagctcacctacgcccctgttgccttgctcatgccattatgtacaggcatggcaggtgcagtatgggtggcaaagaaaatgggatttaaataggcaaaagcaaaaggccgtctgaaaccaagtttcagacggccttttacaataaaattgttaacaatatttgcaaaaacctactgccaaaaatgcgaaactgggggataataccgccctgaaaattcatcccatactgattaaaccttcaacaaaggaaatccaaatgtcttccatcaaacgcgccctgatcagcctatccgacaagacaggcgcagtcgaatttgcccaaaccctgcacaaactcggtgtcgaaattctttctaccggcggtacagcaaaactcttggctgatgcaggcgttcccgttatcgaagttgccgactataccggttttcccgaaatgctcgacggccgcgtgaaaaccctgcatccgaaaatccacggcggtattctcggtcgtcgcgatttggacgaacacgtcgccaagatggaagaacacggcatcggcaatatcgacctcgtgtgcgtcaacctctacctcttcgctgccaccatcgccaaaccaaactgcacgctggaagacgcgattgaaaacatcgacatcggcggcccgaccatggtgcgctctgccgcgaaaaactggaaacacgtcgccatcgttaccgacaccgccgatttcccggccatagctgccgaactcgaagccaacaacggcgcattgagcgacaaaacccgtttcaacctctcgcgcaaagcattcagccataccgcccaatacgacggtatgatttccaattacctgacctcgctttcagacgacgtcttgagcggcacgcccgaaatcgccggattccccggccggttcaatcaaagctggattaaagtgcaagacatgcgctacggcgaaaacccgcatcagcgcgccgcgttctaccgcgatattgaccccgccgcaggcagcctcgctgcatacaaacaactgcaaggcaaagaattgtcttacaacaacatcgccgatgccgatgccgcatgggaagccgtcaaatccttcgacgtgcccgcctgcgtgattgtgaaacacgccaatccgtgcggcgtagccatcgcctccaataccttggatgcctacaaactcgcctacgccaccgacaccaccagcgcgttcggcggcatcatcgctttcaaccgcgaagttgacggcgcaaccgtcaaacaaattaccgacaaccagtttatggaagtcctcatggcgcctaagttcaccgccgaagccctcgaaatcgccgccgccaagaaaaacgtgcgcgtattggaagtgccgcttgaggcaggcgcaaaccgcttcgaactcaaacgcgtcggcggcggactgttggtgcaaacgcccgacatccaccgcatcagccgcgccgatttgaaagtcgtctccaaacgccaaccgaccgagcaggaatggaacgatttgctgttcgtctggaacgtcgccaaatacgtcaaatccaacgccatcgtattcggcaaaggcggtcaaacctacggcatcggcgcaggccaaatgagccgcgtggacagcacccgcatcgccgcccgcaaagcgcaagatgccggtctcgacctcaacggcgcgtgtgccgcatccgatgccttcttccccttccgcgacggcgtggacgtgattgccgaacagggcatcaaagccatcatccatccggcaggctcgatgcgcgatcaggaagttttcgacgcagccgacgaacacggcatcgccatggtcgtaaccggcatccgccatttccgccattgatgcagataaacaaggtaatgccgtctgaagggctttcagacggtattttgcgctattttgcgaaggtagggatgacggttcgggtattcctgacagggtggattttcaaggtgttgtatagggtgtaggaggattcgtaaaaggtgggatgcagggtgtgcttcagcccgctgcatcaaaaatttttggagaaccggcgggagtcggcggttttggtttcggcggggacggtggaaatgggtaacattgacggaatcgacggaagcggtggactgaagcccacccttgtatattggaatcaccgtatcatagcaacaaaccgcccagccgccacccgcgcccacccaaggcacacaaccgttgcgtagctcagggagcggcagggcaacccatcgacacaaccggacagttgccggacaacacaaccgaatgcaaggcaggtttatgatgagtacccaataccattacgcaggtatagtgaattaaatctaaaccagtacagcgttggttcgccttagctcaaagagaacgattctctaaggtgctgaagcaccaagtgaatcggtttcgtactatttgtactgtctgcggctcgccgccttgtcctgatttttgttaattcactatatcgacatcgccaaacgaaacttcgtcatcgccgtttcgtctttgtctaaaaccaaaaccgaaaccaacaaccccaaaggtatcgcccatactatcgaataccttaaaaaacacaaggtcgccctcgtcgtgacggaaagtaccggcggtctcgaaatccccgccgccaaagccatccgccgagcagggccgtgattatcgccaacccgcgtcagacgcatcagtttgcccaatcgcagccgctgaccaaaaccgacgccaaagatgccaaaatgcccgccttcttcgcacagatgacggcacagaaagaagattcgcaaaccatgccctaccacccgcccaccgaagtggaagaagtgttggaagccttggttaaccgccgcaaccaactggtggatatgcggactgccgagaaaaaccgtctgcattaggttcatgaaacgcaagtcgaaagcgtcaaacaactgattgcccattttgaccggctgattgacgaattggacaaacaaatcgacaaccacacccacacgcattttgacggcaaagcccaagtggcagagcaaatcaaaggcatcggttcgataacgacggctacgctgatggcgatgttgcccgaattggggcggctgtcgcacaaacggatagcgagtctagtcggcattgccccacacccgagggagagcggggaaaccaaattcaaaagccgctgctttggcggaaggtctgcggtgcgtaaggcactgtatatggctaccgtggcagcgacacgttttgaaccgcttattcgggatttctaccaacgcctgccgtccgagggtaagccgtataaggttgccgttacggcatgtatgcgcaaactgctgacgatatcgaatgcccggatgcgtgattattttgccgaaaacgataccgccgaaaacggtatctaaacggcttgatttgagttttggtatttttgcccgacggggtgaaaaatacagttgcttttttatgtctgtccgtttcgcaaaaaacatcggcttaatactatatattgtgttttatgggtttgagatgcgccgggcgttgattgcgaaaattaagattgctcaaaaggagctgggcttggatgacggtacctatcgcgcggtgttggagcgtgtgacgggcaagcggtcgtgtgcggatatggatgtttccgaacttgagtctgttgtcgctgatatgcggtcgcacggatttaagcctaaagcaaaaggtaacccacacggcaaaccgcatctgcgtcggacatcatcagcggcaatgttggacaaagtcgaagccctgctgaccgtcggcggcaaacattggaactatgcacacgcaatggcgcggcggatgtttggtaaggataaggtcgaatatttagacgatacgcagctacataaactggttgctgcgttgcagattgcggaaaacaggaaaacggaaaaagcgggtggggatgatggggttcgaaaaagttgaacatttattgccggataccgtgttggacattgtggatgtcatcggactggcagcgacggaacagctggtcaaggcgattggcggggcgcggtttaaatttggtaagggcaaggtggacaccgagcgtttggcaattttggtcgaagccatcggcgaagtgaaaacacatgagctgttgcaggtatatggtggcgaggaattgtatgtcccacggtgcggcaaggcgttaatacagttgagaaaccataggttttatcaggagtttgtcaaattgcgcgatattgataagaagagcgggcttatggcgatgacgaagctatgccctaaatacggcatctcttcacgaacgggatatacgattatcaatgaaatgagccgacctgcggcacagcaggcagctttattttaggcagtgatgtgtgaccaggctttggccgtctgtattcagacggtcttttttttggtttgcaggggtgaaacatctaccgttcgggacgatgggttaaagacggtttaatggggttttcaaatgttatagtggattaacaaaaaccagtacggcgttgcctcgccttagctcaaagagaacgattctctaaggtgctgaagcaccaagtgaatcggttccgtactatctgtactgtctgcggcttcgtcgccttgtcctgatttttgttaatccactatatgcaatcaatattttttggagatgatgaatgggcaaaaccgtaaccttaaccgctggacacagcaacaccgacccgggtgcggtcaacggaagcgaccgtgaggcggacttggcgcaggatatgcgcaacattgtggcttcaatcctgcgtaacgattacggcctgaccgttaaaaccgacggcacgggcaaaggcaatatgccgctgcgcgatgcggtcaagctgattcgcggctcggatgtggcgattgagttccacaccaatgcggcggcgaacaaaacggcgacaggcatcgaagccttgtccacgccgaaaaataaacgctggtgtcaggtgctgggcaaagccgttgccaagaaaaccggctggaaactgcgcggcgaagacggctttaagccggataacgcagggcaacattcgcgcctggcttatgcgcaggcaggcggcattgtgtttgagccttttttcatcagcaacgacactgatttggccttgtttaagacgaccaaatggggcatctgccgcgcgattgcggacgcgattgcgatggaattgggagcggcgaaggtatgaaaaagtctttgattgctttatgtgttgcccattgtgcaaagttgaaaaacgattttggcgtaccaccgttacctgaaatcaaaatcacgccaagccctgttcgggtaggctctttgaaacaacatccgagcctgcgcttgggtaaatcaggcgtggcggctgctaaacgtgcggcgcgcaaacgcaagaatcgtcgttaatcatgggacaggttgcgttttacgaaaagatgattgggctgtggtcggccaaaagccgtgaggcaagcgaacaggcggacttggctgcgtttgaatttgcggagggcgaactggccaattatcgggaaatgctgaaacggcacctgcaaaccaaaagtgtggaatagcaatgcgtattttggatatttttaaaaacccggcgacaggcaatgtgtcgcactcgaaactgtgggcaaacgttgcctgcgcggctgggacgtttaagtttgtgatgttgcccgatccgtcggcggaaatttgggcggtgtatttgggcattgtcggcggctatgcggtggcgcgttcatttgtcagcgtgaagcgtcaggaggtcgagaatgaatctcgtgaaactgctggcgaataactggcaaccgattgccattatcgcgcttgtcggcacgggcttggctgtgtcgcaccatcaaggctacaagtcggcatttgcgaagcagcaggcggtcatcgacaagatggagcgcgacaaggcgcaagccctgctgttgtcggctcaaaactatgcgcgcgaactggaactggcacgcgcggaagctaaaaaatatgaagtcaaggcgcacgctgtcggcatggctttggcgaaaaaacaggcggaagtcagccgtctgaaaacggaaagagacctttgcaaaattcctttccctcccgacagccgaaacccaaacacaggttttcggctgttttcgccccaaataccgcctaattttacccaaatacccccttaatcctccccggatacccgataatcaggcatccgggctgccttttaggcggcagcgggcgcacttaacctgttggccgctttcaacaggttcaaacacatcgccttcaggtggctttgcgcactcactttaatcagtccgaaataggctgcccgcgcatagcggaatttacggtgcagcgtaccgaagctctgttcgaccacatatagtggattaaatttaaaccagtacggcgttgcctcgccttgccgtactatttgtactgtctgcggcttcgtcgccttgtcctgatttaaatttaatccactataacgggtcttcgataaatatcggttacgcttggtttgcacttccgacagcgggcggttgcggcaggctttgctcataatgccgtccaacaactgatgttcttccagatgttgccggttttccgcactgtcatagcctttatcggcatagacggtcgtaccttcgggtaacccttccaacaacggcgacaggtgtttgcactcatgggcattggcgggggtgatgtgcagtttctcgatatagccttccgcatcggtacgggtatgttgtttgtaaccgagtttgtagaggccgtttttcttgatccaacgggcatcgctgtccttactcggtgtggtttggccgctgatttgtccttcttcatcgacttctatggcctgacgctgttcgctgccggcggtctgaataatggtggcgtcaatgacggcggcggatgctttctctacttttaagcctttttcggtcagttggcagttaatcagttccaacagttcggacagggtgtcgtcttgcgccagccagttgcggtagcggcataaggtgctgtaatcggggatgctcagttcgtcaaaacggcaaaacaggttgaaatcgatgcgggtgatgaggctgtgttcgagttcgggatcggagaggctgtgccattgtccgagcaggacggctttgaacatggatagcaggggataggcgggacggccgcggtggtctcggaggtaacgggttttttgacggttcaggtactgctcgatcggctgccaatcaatcacttggtccaacttcaatagcgggaaacggttgatgtgtttggcaatcatggcttgcgcggtttgccggaagaaggtgctcatgagaaatcccctaaatgtcttggtgggaatttaggggattttggggggattttgcaaaggtctcaggcggcaaatcgccacccttcccttcaaaccttccgcctgtcccaacagcagacaggcgaaaaagcccttaccactgataaccgacagatgcggaagcaccgaaatggccgcgcgaattgccggaagccgtgcctttgataatccaatttccgccgtcggaaatactggagtagccgatggcgtaaccggcttcgccgcgataagtgccgccgccgatcgccatcatactcttgccgggcaaatacgcctgaaccagacctgcggttgcaatcgcttgggcgatgcccgcacgcgcgttgccgtccacattgtcgatgcggttgttcaagttttgcgccacgcctttaagttgtgcgacgtttgtaacatccccctctttaacgcccggggcgacattggtaatgcggacgggtttgttgtccttcttgctgccgacattcaatgcgtccccatccacgctcaaagtgggcgcatccgcccccgcgccgagcgaaacgctggaaaactgcggggtcatcgaagtggcgatgtcgatatttttaccgttgcgggtaatctcgatgttgttgccggcattaatgttgacggtttcatccatctttcccttgctcggcgaaacattgccgctgatgactttgcccgaagaacctgcaaccgctttggaatccaaattccaaccgctgttttgcagctgattgacgtttagggcatcgccgacatttacatcatacataacagtgatgttgccttgatcatctttacttacagtcgcagttgtacctttaccactagcaaaggttacatttgtgcctgatgtaacggtttcaaacttgtcagcttgacctgtttgaccattagcggttgttgttttcattctccaaccagccttgtttactgcatcaatcacttcttttgcagtcactaagccttcgccttcgtctgtagaagaaccattctcgcctttgtctttaccagtaaccaacttaccgtctttttctttaataacagaagtcttcgcaccgattttaacttcggttttcttgccgttgtctttgctttccacattaacagtcgttgttttcgtatctgcgctcaagaactcgactgtgtcgtaagtgcggacgaaatcaacgttatcggaagctgttgtaccgggtttaacgcctttaatgttccagccagcgtttaatacgtctttaacgcttgccgcacgttttttctcgtcatcggtaacgttgtcgttggttacgtttgtggtcgctccggtattcagcagcgtatcggtcaaagtcgaaccaataccgttcagatgaaccgtggtgtcgccgttcgtcccagccgtttctttcgcaaaattcaagcctttggtgtcgcttgtgatgttgactttattgccgtttgcgctaaacgataatttttcagttccaacactggtcagatctgtgaggtcttttttcagcgagtaggtgaagtttgtgccgttttgtttgattttcaggttgtcgccggctttgagggtgatttctctggctgttagtactcctttctcgttgaaatatactgcccaatctgaattttcttctactttttctttttctcccgtgccttctttatcggaattgactatcaacacggcaacagtgcgttgtacggggtctaaatataaatcttcttcttgctcttcattgttagcacttgcctgaaccgttgcaaacaacagtgtcgccaatacggcggtcttcacggttgcggaggcgcgtttggtgtggttgcgtgtgagctcggatacgacgacccaggcattgagggcactattccaaatgatgcggtatattttgttcattttgttttttcttttggtttgtttgaatggttaaatcggggtttgggggcggatggtgcggcatccgcccggtttttgggggttgggggttttctgataaattcccccaacttaaaatctcgtcattcccgcgaaggcgggaatctgggacgtggaatctaaggaaactgttttattcggtaagtttccgtgccgacgggtctggattcccgcttttgcgggaatgacggcggtggggtttctgttttttctgatagattcctgtggtttttctatggattcaatcattcctgataaattcccataatctaaaatctcgtcattcccgcgaaagcgggaatctaggacgtggaatctaaggaaactgttttatccggtaagtttccgtgccgacgggtctggattcccgcttttgcgggaatgacggtcggtggggtttctgttttttccgataaagtcctgccgcgttgtgttgctggattcccgcctgcgcgggaatgacggcggtgggggtttctgttttttctgatagattcctgtggtttttctatggattcaatcattcctgataaattcccataatctaaaatctcgtcattcccgcgaaggcgggaatctaggacgtggaatctaaggaaactgttttatccggtaagattccgtgccgacgggtctggattcccgcttttgcgggaatgacggcggtggggtttctgttttttccgatagattcctgttgcgttgcgtttttggattcccgcttttgcgggaatgacgcggtgggggtttctgttttttctgatagattcctgtggtttttctatggattcaatcattcctgataaattcccataatctaaaatctcgtcattcccgcgaaggcgggaatctaggacgtggaatctaaggaaactgttttatccggtaagattccgtgccgacgggtctggattcccgcttttgcgggaatgatggcggtgggggtttctgttttttccgataaagtcctgccgcgttgtgtttctggattcccgcttttgcgggaatgacgcggtgggggtttctgtttttgctgatagattcctgtggtttttctatggattgaatcattcctgataaattcccataatctaaaatctcgtcattcccgcgaaggcgggaatctaggacgtggaatctaaggaaactgttttatccggtaagtttccgtgccgacgggtctggattcccgctttcgcgggaatgacggcggtggggtttctgtttttgctgatagattcctgtggtttttcggttgctggattcccgcttttgcgggaatgacggcggtggggtttcggttttttccgataaattcctgttgcgttgcgtttttggattcccgcttttgcgggaatgacggtcggtggggtttcggttttttccgataaagtcctgctgcgttgtgttgctggattcccgcctgcgcgggaatgacggccgccggacggcaaacgaccatacacaattattgacaaccccatttattgcgaaagtcagcctaggagaatcgatctaattgtcaacattcccttatgatcaaagggattacactttattttacgcaaatgcgggggggggggtgatttttgacgttttttgccgaaaatttacattcggacgacgaaaaggaaaaagccgtgtcgcatctgtgcaacacggcttggcgggcgcaaacggatatagtggattaacaaaaaccagtacggcgttgcctcgccttagctcaaagagaacgattctttaacaagtgaattggttccgtactatttgtactgtctgcggcttcgtcgccttgtcatgatttttgttaatccactataaaacggtgttccctgccgccgcaggcggaacgccggatgacggggttttccctaagggtgcggctgccgctatatcacgaaatccaacaggtagaaatcttctttgcccacgccgcattcggggcatttccagtcgtcggggatgtcttcaaacttggttccgggggcgatgccgtgttcggggtcgccgtgttcttcatcgtaaatccagccgcaggggccgcacatatattgcgccatttgtgtttccttgttttttgtatagtgggttaacaaaaaccggtacggcgttgcctcgccttagctcgaagagaacgattctctaaagtactgaagcacccgtactatttgtactgtctgcggcttcgccgccttgccctgatttttgttcatccgctataaatcagggtttgggagaatggtgcggtatccgcccggtttttttggggttggtttttttcgatagattcctgtggtttttcgattactggattcccacttccgtgggaatgacggtttggaggtttcggttttttcgatgaattcctgttgcgttagggggggggctggattcccgcttttgcgggaatgacggtttgagggtttctgttttttccgatggattcctgttacgttgggggctggattcccgcttttgcgggaatgacggtttgagggtttctgttttttccgatggattcctgttacgttgggggctggattcccgcttttgcgggaatgacggtttgagggtttctgttttttccgatggattcctgttgcgttgggggctggattcccgcttttgcgggaatgacggtttgagggtttctgttttttccgatggattcctgttgcgttgggggctggattcccgctttcgcgggaatgacgcggtgggggtttcggtttttccgcctgtttattttgcggcttcgattgccgctatttctttgcgtaggtgtttgatagcgggggttacgatggcaacaaacattgcttcgcggacgcgcctttgggcgggactgcgcatcaggtagccttttgcgccggaatgcagggcggcggattgggcggcggcaagtgccagtacggcggcggcttcgcgcagcttgagggtagcaaggttgtcgggcgtgccgctccaagccaagccggcgagccgttcggtttctgcccacgcgccgtccagccttgttttgaggctgtcgtagccgtcgttgaggtagttgttgacttcggcgttgacgacgttggcgaggcggatgatgccgaggctgccgtcgattacgcccgcgccgatgccgatttgcaggaggataaagcctgctttgatgctttggatgtagtcggcaaactgttcgggcgcggcgatgatgtcttcgtcggggataaatacgtctttgaaattcaggctgaaggtgcgcgtaccttcgagggcgcaaaattcggggcagttttgcaggcttacgccttcccattgtccgcctgtgatgaacataacgtagccgtcgccgatttgggcggtattcgcccagatgtggtcttcaccgatgttggacacccacggcagcgcgccgttgactgtgtagccgccttccacgcgttcggcttggaggttgtgtttttcgatgtcggcaaggtgtttgacggtattggacatgcccgtacccgccaatactttgccttgcaggatgtcggcaaggtatttgtctttgacggcccggttgggcgtttggtgcagataccacgcgcaagccgcctgacaccacgcactgaaagaggttgcgccgcattctttgccgatttcgcgcaatacggcgatttgcgttgccaaacccaagccgttgccgccttcggcttctgtaccgactgcgccgaatccaccgattgcgccgagttcgcgcataaatgcttcggggtagtatcctttgcggtcgatgtcgtccactatgggtttgagcttggttttgacgaattcggcaacgttggcaatcagggtttgggcgttcatctttgttccttaaggtttgcggggaaatcgggggcgcgcctgatgcgcggctgcttccctgccgcttaggcggcttgtttttgtttgagggggtgtttttgaaaaaccgcccgatattcgggcggtttgccgtatcaggcgtaagcctgcaattcggggttgatttcggtttgtccgaggttgttgacgtagttgcacagggttgccaaggctacgcccatcacgacttcgactgcctgctgctggttgtagcccgcatcgaaaaatgctttgagttcctcgtcggataccgcgccttttttcgccattacggcttgggtgaaggcggcgagcgcgccgagtttggcatcgtcaaattcgcctgctgccaaagcgcgcgcggctttgacggattgttcggacaggagttttttcagggttgcgagtttggtgtgccctgccacgcaaaaaccgcattggttggtacgggcggcgatgatctggatgacttcgacttcgccggcggtcaggctgttggcggcgttgagcttgccgacttcttggtaaaacgccaaggcttcgggggcgtttgataatacgccgataaggttggggataaagccgttgttttgaagtaccgcctcgacgcgcgctttggcggcttcgggggcggtttcgagggtgtgtacggttaaacgtgccattttctttccttgttcgcaaatattgggtacgggcgcatggtatgcatttcggaacggaataggaaagactgattggttatgtgctgcaaacaaaaggttataagaaatgccgtctgaacatttttcagacggcatgatggaaaagaaaacgcgcttatcggcccccgcgcccgaaatattgcgccaatgcggcttggggattggctgcctcaaccgtttcgggcaattcggtatagccgcgcgataaaaggtggcgtgcataaaggctgttgccctttgcgccgaaccagacggaaaccgccaagcccaatacgttaaacgccgagtctgtggcgggcgtgtcgccgtaaaccagttgggcaaacacagccagcacgaatatcgcgcccgtcagccccagccccaaaccccacattcttttgaaacacgcccacagcgtgccgaacaagagccccggccatgaccagccttgtttgacggcttggggcggcagggcgggatgggtgtagattttgtatggtttcatcgtgtttccttttcggttgaaaccctgccctttgggaaggtaggatcagactttatagtggattaaatttaaaccagtacggcgttacctcgccttgccgtactatctgtactgtctgcggcttcgttgccttgtcctgatttaaatttaatccactatatttgggaggcgcgcgcgcctgtgccggcatacggcttgaaagcgattacccgatggggaacttcaaacccgacaatgccgtctgaacggtgtcttgccttcagacggcattgcctgccttcaaagcggacgcgcttattccgcccagtttttctttttgctggttttgcctacgcccgggttgaagctgttggtcgggtcaagtttgcggtaaaactgtttgagcgcgggcttggcttcgtacaaatggccgacgttgtgttcggctggatattgcgcgccgcgttgatccaagagatgcagcatttcgtgttccaatgccatgcagtcgttgccttttttgatgatgtaatcctgatggaaaacgtggcacatgaaatgtccgtagtagagcttgtggatgattttattgtcgatttccggcggcagtttttcaaaccagtcgcggtcgtcgcggcgcagggcgatgtcaagcgcgaccaagtcctccacttcgtcgtcgtgtacggcacggtagcggatggcggctgaggcgacggcgaaacggtgcagcatcgcggcttgggtttcttcggcgttgcactcgaaaaacgcgccgccgtgatgtgcaaaatactctttcaggaacgcgcgcgcctcatccacgccttttccgcccattttcagaatcaggtggtgttcgtatttgtcgcggtaatcgcgcatggatttgggcagatggtcaggcaggaatttgctgacgaactgcattgccttgtcggaaaaatgtttgggcaggaagctgacttttttgccgaacctgtccacgcgtgccttcaaatcaaataatttcggcagttggtgcgtaccgaattttttgatgacgtaaaacgtatctttgccgtacacgtcggcaatgtcgaaagcgtggcggtggatgtattcgccggaaacgggcaggctttcaaattcgcccaaggcggcgcggcggatgtcggtcagctcgttgatgtcgttcgtgccgatgtagaacacggccgtttgtttttcttgcggaaaggtatccaagcggacggcgaataccatcagcttgcccgcgcagcccgaggcttcgtaatggcgcgctgggtcggcattgaaacgcgcggcggtcggttcgtccacttggcggacatgttcgcaataggcgtggtcgtgtcctttgcccgcgtcttgcgtgatgtctttgttttgataatgatgaccttgaagattggtcaggatttcttcgggcgtgttgcccaagtctatgcccaagtggttgaccagttccaacctgccttcttcgttgatttgggcgaacaacgccatttcggtgtaggccgggccgcgctgtaccaacgcgccgccagagttgttgcacacgccgcccaagacggacgcgccgatacaggatgagccgataaccgaatgcggttcgcgccccaaaggtttcagcagcaattcgagctggttcagggtcgagccgggcaggcagacgacttgttcgttgttgttgatggtttggatgatgttcatccgcatggtgttcacaatcacgatgtcgcggtcgtaatcgttgccgtcgggggtcgagccgcccgtcaaaccggtattcgccgcctgcgtaatcacaatcacgtctgcttcgacgcacgcctgcagaattttccacatttccagaatgcttccggggcgaaccaccgccaacgccttaccctcgccgaagcggtaaccttggcggtattgttcggttttcgcggggtcggtgatgatgtatttttcgcctacggtttgggtcagtcttgacagtaattgtgatgcgctcatggcagtttccttaaaattgtcggcaggtgcattgcacattggaattgttttcacattgtagttatacgttatggcaaagtaaagaaaatgccgtctgaacggctttcagacggcatcggtgcgatacgggaacgccggaacatcgaagctccggcgtttcaaatagggcggcgggccaaacccccggcactggcgcattggagtgggctgctggcttccgcccctgacccggtgttccgatttgccatgcggggagacccgcctcagagaaacggcattataacgggttttctgaaaaactcaaccgttttgatacggtcatacgccggaaacaccacctaaaatttatatttgataatattgtcaacaatttctcaaagcgttattttgtttctataagggtatttcctgtttcggcattgaaaagtatcaaaaattgaactacattatcgccttttcaaactcgcctgaaaccgacttttcagacggcattcaaataaaaactgccaaacacggacacaccatgaccacgactaccgcccctcagcgtattcgggaaatcccctacaactatacttcctacaccgaccgcgaaatcgtcatccgattattgggcgacgaagcgtggcaaatcctgcaagacctgcgcggtcaacgcaaaaccgggcgttcggcgcggatgctgtttgaagtgttgggtgatatttgggtggtcgtgcgcaatccgtatctggtcgatgacttgctggagcacccaaaacgccgcgccgcgctggtacgtgaaatgcgccaccgcttaaatgaaatccgcaaacgccgcgacgataatcggcaagtggatgtgttggttgccgcagcagaaaaagcagtcgagcgttttgatagcagttttgatgaaaccagccaaaaacggcggcagattttggagcgtttgagcaaaatcaccaagccgcacaatattatgttcgacgggctggcgcgggtaacgcacgttaccgatgcaaccgactggcgcgtggagtatccgtttgtcgtcgtcaatcccgacacggaggctgaaatcgcgcctttggtgcgcgccttaatcgagctggatttggtcattattccgcgcggcggcggcacgggttataccggcggcgcgattcctttggacgcaaacagcgcagtcatcaataccgaaaaactcgacaagcatcgtggtgttgaatacgttgagctggcaggcttggacggcaagcatccgattatccggtgcggcgcgggcgtggttacgcggcgggtggaagaaaccgcgcatcaggcaggtttggtgttcgccgtcgatccgacttctgccgacgcgtcatgcgtgggcggtaatgtggcgatgaacgcgggcggcaaaaaagccgtgctgtgggggacggcgttggacaacctcgcctactggaacatggttaaccctcaaggcgaatggctgcgtatcgagcgcgtgcgccacaatttcggcaaaatccacgacgaagaaaccgccgtgttcgacgttcacacgctggattcagacggcatcaatatcgttaaaaccgaacgcttggaaatccccggccacaaattccgcaaagtcggtttgggcaaagacgttaccgacaaattcttgagcggcctgcccggcgtgcaaaaagaaggtacagacggcatcatcaccagcgttgccttcgtgttgcataaaatgccgaaatacacgcgcaccgtgtgtatggagtttttcggtacggtcgccaccgccacgccatctattgtcgaaatccgcgactttttgcttgcccatgaaagcgtgcggctggcgggtttggaacatttggactggcgttatgtccgcgccgtcggctacgccaccaaagcggcgggcaagggacgaccgaaaatggttttgctggcagacgtggtttcagacgacgaagccgccgtagaggcagccgccgaacacatctgtgaactcgcacgcgcccgcgacggcgaaggctttatcgccgtatcgcccgaagcccgcaaaaccttctggctcgaccgcagccgcaccgccgccatcgccaaacataccaacgcctttaaaatcaacgaagacgtggtcatcccgctcgaaaggctcggcgagtattcggacggcatcgaacgcatcaacattgagctttccatccaaaacaagctcaaactctgtgccgccttggagcaatatctttcgggcaaactccccatcgacaaaatgggcactgacctgccgaccgccgaactgttgggcgaacgcggcaaacacgccctggcccacgtttccgccgtcaaaacgcgttgggaatggctgctcgccaatcttgacacgccgcttgccgactacaaagcccgctacggcgcagccgtccacgccgcacccgaagccaaaaacaatgaaagctgctttattgccttccgcgatttccgcctgcgcgtgtctgtcaaagcggacgtaatgaaaccgctttctgaaatcttcagcggcaaaaccgacaccaaaattatccaaggcttgggaaaaatccacgcaaaaaccgtacgcagccgcgtctttgtcgccctgcatatgcacgccggcgacggtaacgttcacaccaatattccggttaactcagacgatgccgaaatgcttcagacggcataccgctcagtcgaacgcattatgaaaatcgcccgttcgcttaacggcgtgatttccggcgaacacggcatcggcattaccaagctcgaatttttaagcgacgaagaaatgcagccgttttgggactacaaaaaccaagtcgatccgaaacacaccttcaaccgtcacaaactgatgaaaggctcggacttacgcaacgcctacacgccgtccttcgagctgttgggcgcggaatcgctgattatggaaaaatcaaacctcggcacgattgccgattccgtcaaagactgcctgcgctgcggcaaatgcaaacccgtctgctctactcacgttccgcgtgccaacctgctgtacagcccccgcaacaaaatcctcggcgtgggcttattgatcgaagccttcttatacgaagaacaaacccgccgcggcgtttccatcaaacactttgaagaactcatggacatcggcgaccactgcaccgtgtgccaccgctgcgtcaaaccctgccccgtcaacatcgacttcggcgacgttaccgtagccgtccgcaactatcttgccgattccggccacaaacgatttgcgcctgccgcagctatgggtatggcgtttttgaacgccaccggcccgaaaaccatcaaagcccttcgcgccgccatgatacagatcggcttcccagcgcagaatttcgcctacaaaatcggcaaacttcttccaatcggcacgaaaaagcaaaaagccgaacccaaggcaaccgtcggcaaagccccgattaaagaacaggttatccatttcatcaaccgcccactgcccaaaaacgtacccgccaaaacaccgcgctccttattgggcatcgaagacggcaaaagcatccccatcatccgcaaccccgccgcgcccgaagatgccgaagccgtgttctacttcccgggttgcggctctgagcgtctgttcagccaaatcggacttgccgttcaagccatgctctggcacgtcggcgtacaaaccgtcctgccgcccggctatatgtgttgcggctatccgcaagacgcaggcggcaataaggcaaaagccgaagaaatgagcaccaacaaccgcgtggctttccaccgtatggcgaacaccctcaactacctcgacatcaaaaccgtcgtcgtcagttgcggcacttgttacgaccagctcgaaaaataccgctttgaagaaatcttccccggctgccgaatcatcgacatccacgaatacctgctcgaaaaaggcgtgaaactcgacggcgtaaaaggtcagcaatacctctaccacgacccctgccatacccccatcaaaaccatgaacgccacccaaatggccagcagcctgatggggcagaaagtcgttttaagcgaccgctgctgcggcgaatccggtatgtttgccgtcaaacggccagacatcgccactcaggtcaagttccgcaaacaagaggaaatcgagaaaaacctcaaagagctgccgcagggcgaacccgtcaaaatgctgacctcctgccccgcctgcctgcaaggcttgagccgctacgccgacgacaacaatatgcctgccgactacatcgtcatcgaaatggcgaaatacatcctcggcgaaaactggctggatgagtttgtaaaaaaagccaacaacggcggtgtagagaaagtgttgctgtaacaacggacacggaaatgccgtctgaacgccgaaagccttcagacggcattgtttgaaccaaatatagtggattaacaaaaatcagaacaaggcgacgaagccgcagacagtacaaatagtacggcaaggcgaggcaacgctgtactggtttaaatttaatccactatacctacccaaatcatgattgacagacaaacaaacgaacccaaacaaaaaacccgaatcatccttgcccctatgcagggtctggtcgatgacgtgatgcgcgacctgctgacgcgtattggcggctacgacgaatgcgtcagcgaatttgtacgcattacccataccgtgcattcccgatccatatggttaaaatatgtccccgaaatcgccaacggaaacaaaacgttttccggcacgccttgcaccgtccaacttttgggcagcgatgcggacaatatggcggcgaatgcgctggaagccgtccgcttcggtgcgaacaaaatcgatttgaacttcggctgccccgcgcccaccgtcaacaaacacaaaggcggcgcaatccttttaaaagagccggaactgatattccacatcgtcaaaacgctgcgcggacgtttgcccgcacatattccgctcaccgcaaaaatgcggctcggttacgaagacaaaagccgggctttggaatgcgcctgtgcgattgccgaagggggcgcatgcggactgaccgtacacgcgcgtaccaaagccgagggttacgaaccgccggcgcattgggaatggataaggaaaatccgagacagcgtcaatattcccgttaccgccaacggcgacgttttcagcctgcaagactatatcggcatcaaaacaatcagcggctgcaacagcgtgatgctcggtcgcggcgcggtcatccgccccgatttggcgcggcaaatcaagcaatacgagaacggcgggccggtcaaagacacggattttgccgaagtttccaaatggatacggcagtttttcgagctgtgcctgacaaaagaggcaaacaacaaatatccgctggcgcggctgaaacagtggctgggtatgatgaagaaagaatttgcagcagcacaaaatctgttcgaccgcgtccgaacggttaaggatgcggacgaagttcggaacatcttggctgaatttgagcgagaaatgaatacttgaatatgtatagtggattaacaaaaaccggtacggcgttgcctcgccttagctcaaagagaacgattctctaaggtgctgaagcaccaagtgaatcggttccgtactatttgtactgtctgcggcttcgtcgccgtgtcctgatttttgttaatccactatatccgctccaaagcaaatgccgtctgaaaacctttcagacggcatttgttgtctttattgccgtttttcgtccgtatccggatttttgtttttcagcttcgcacccaagcccaaacgcctttcataatccgattgcggagtatcgtcttcctgcataccgaacgcgccggcattgacccacagcgacagcagcgcgacgacaaaggcgcaaaagccaatcacataccaaaacattgcccctcccgatttgttaaaatcatatcaaatacagtgccgaatttatcacaaacgcacgggcaaatatagtgaattaaatttaaatcaggacaaggcggcgagccgaagacagtacaaatagagacctttgcaaaattccccaaaatcccctaaattcccaccaagacatttaggagcaccttcttccagcaaaccgcccaagccatgattgccaaacacatcgaccgtttcccactattgaagttggaccaggtgattgattggcagccgatcgagcagtacctgaaccgtcaaaaaacccgttacctccgagaccaccgcggtcgtcccgcctgtcccctgttgtccatgttcaaagccgtcctgctcggacaatggcacagcctctccgatcccgaactcgaacacagcctcatcacccgcatcgatttcaacctgttttgccgtttcgacgaactgagcagtatagtggattaacaaaaaccagtacggcgttgcctcgccttgccgtactatttgtactgtctgcggcttcgtcgctttgtcctgatttttgttaatccactatactttatgccgctaccgcaactggctggcgcaagacgacaccctgtccgaattgctcaaactgattaactgccaactgaccgaaaaaggtttaaaaatagagaaagcatccgccgccgtcgttgacgccaccattattcagaccgccggcagcaaacagcgccaggccatagaagttgacgaagaaggacaaatcagcagccaaaccacaccgagtaaggacagcgatgcccgttggatcaagaaaaacggcctctacaaactcggttacaaacaacatacccgtaccgatgcggaaggctatatcgagaaactgcacatcacccccgccaatgcccatgagtgcaaacacctgtcgccgttgttggaaggtctgcccaaaggtacgaccgtctatgccgacaaaggctatgacagtgcggaaaaccggcaacatctgaaagaacatcggctgctggacggcattatgcgcaaagcctgccgcaaccgtccgctgacggaaacgcaaaccaaacgcaaccggtatttgtcgaagacccgttatgtggttgaacaaagcttcggtacgctgcaccgtaaattccgctacgctcgggcagcctatttcggactgatttgcgcccgctgccgcctaaaaggcagcccggatgcctgattatcgggtatccggggaggattaagggggtatttgggtaaaattaggaggtatttggggagaaaacagctgaaaacctgtgtttgggtttcggctgtcgggagggaaaggaattttgcaaaggtctcagagtgagtttattttggggcggcggcaggtcgggggcaagcggcgtggggcttggttgtggtttttaggtttttgggggtaaaaaatgccgtctgaacttttcagacggcgtttgttttttctatccaatcgaggaactgccgccatttttccagcggcatatcggcccgacgggtttcggtatcgggttcggcttcccagcggcctacctgtatgtagtgcttcaccccgacgatttgcgccaactcggcctgtgtcagtttgcagcggttgcgaagggtgcggaggttgtaaggcgtgtagccgagttccatgtcgttgcggtttattttgtttcgcatatttttttgactgcccggcggcaggtttcggtaaggatggcggcaaatcgggcttcgtctgccggtttgccgtcgaaaaaaataaaatcgtaaagggtgatgccgttttcggaatggcggtaatgcctgcccgggcattcgccgtctgtctgcctgtggattttggcaatcaggcggggatagcggcaatgggtaatgaaacggcttgcgccgtcttgcccgataatccattcggggtagcggttgaatagtgcggctctgttcattttgttcgtgggataaagcccctcgcggggcttgtggtcaggcaaatttgaatatcagtgccaacacggcggcgatggcggtaaccagcccggtggccgctatcatgggataccagcgggactcttgggctatttttacggattcggcgttgattttgtgcgcgtcggcaatgattttggcgatttcggcatctatttttctcagactggagtgtttcatttcttgttcgattatgttcatcgtacttcctttcgtttttggcggttgccgccgcttgtcggatggtaggatgtctgccatgtgtatatattgataccttttaggttttattgcaagtgttttgggcggcggcttcgtatgcttggcggtggcggcggctgtaccattcggcgagttcgcgccgctcttggaggcggtagctgtcggcggtcaggtagtggtgcaggcttgagaagccggcgcgttggagggcggcgcggctgatgtggccgagggcgaggtctgttgtgagggtgtcttttccggcggtcaggctgatgttggtgaagaggtggcggaatccgtgcattgtgtgtttggatttgccgggggtgctgccgtcatagcccagtcgtcggatggcgttgtgggcgaatttgatgctgatgtggtcgggatggggggcgggtttgcgccgtgggcggatgccggggaaaaggtggatgttgtcgccggtctgtgtgtgcagctctcggagtatttctaccgcccagtccgacagtaggacggtaaaggggtgtttggtcttcatgtcggcggcggggatgtgccataaccgggcggtgaggtcgatgtcttgccagcgggcggaaagcagtgcggacggacgggatgacttccccggtttccccatcaatccgcgccgcctcgatttttccgttggcgcgcagcatttccaccgcctgccgcaccgacatcaaccgcttgccgttgcgcctcatcgcctccaccaaaaccgccgaaatcaatttggcttcttccggtttaagctccgtcttgcccgcatcgctgcgccgtttgcgcgtcggcttgacgctgaccgcctccagcttgcggtatagcgtggcaaggctgatgcccaattcctgcgcctgctgcttaagatatgcagagcgtgcgccgcgttccattgcttccgcctgattctcgactgccttaagacgctcaatcattgccggattcatcgccttctcccgtttcaccgcccaaccattccggcacattgtctgtcggtgcttcagtcggcagggcatagctttcgcgcagttgctcgcagtccaaaataatttgattgagcgtgccgaccatctttgcctgatggctgatcccgtgtgcctcactgtgcgcattaagttggtcgaacaaatctttcagacggctcacttgactgcggataccgacctcaaggcttgttaactgcatcgccaactcgctgcctacgtcttccgccttcggctctctgacaacggtttgcttcttagccagcttctcggccagctcatcaattttggctgttttggttttcatcacttcgtctttggcggcgaggttttcgcggctttcgcgcagggcgacgcgcagctcgcgcaccgtcattcggtccacatcgtcaaaggtcatgccgttgacttcttccccttcggccaaacccaccagcgtaacgtcttcttcgaccagcagctcaagcagcttcgacttgcccaaatccatcagcttcggcgcggctttctgcatttgcggggtcgcaaagcggcgagtggctgacatcagacgtgatgtttctgcgatacccagcccaaattggcttttcacaatttccataaaccgtccgtgttccgtatgctcttttaaaataatcagcgcacgtcccagttcgaacatgccttccatcgtctgccgtactgcttgacgaccgcgttcaacccaacgctcttcgctataagtctcgccgttaccccactgctccatcaccagcacactgcgcatcgctgcctgattgcttactttgtcggttgcgataatttcaatttctgtattcattttttatctccaaagtttccgacgtcggaaactttcaaaatccgttaatccacatcgacccgcttgccgatttcggcaatcttgctttgcagccgttcatgctgctgcctgaaccgctctgcgatttgcagggttttgatgccgtaggcgtagttgccgttttcaagtttgatgaccaatcccgaggcaaccaaatcatcaatatccctgctgacttgcgatggcgtcagccccagtccgaccgataaatccttattgctcagaccgataatcggatgctcgtcaagcgcgataaagaccctcaatagccgttgtacccttttactttctgccatccgcatcctccttatttcagtcccagcttcttggcaatttcgtgccccttgccgtaattgcctttgcgctgtccgccgatcaccagatacacatcgcgcggcttaaagccgttctctcttgcccactgcgccagcgtctggccgtttttggcaaaattttctttcaattcgtctgccgtaagcatttctttggcctgtacgcgggaaaatttcagtatccgtccgtacggttggttaatacactcatgattaatcatcgcttttctccttcatccccagcaaaaccgccgcttcgtggcttttgccaaaattgcctttcagcttgccgcgcaagaggtgctccaccgtggtgcgctccagattgaaatatttcgcccaatgcgccttgcacaccccgttgcgcttaaaccacccggccgcgctctcgcgcgtttgcggataggaaataggcttgaaattcaaaggtttttccatattatttatgcctttcgtgtgatataatgtgtttgtttttaggtctctttgcacgataaacatccggtctgttgtgcagcagcagggtcttggcttgttttaaagtaaacaagctttttctcgtagctgggtgtatgtgatccatcatgagctgtcgcgcatgagccttcaaagtgttcattttttcgtcctttctcgtgatgatttagggtgtttgtgtttcgatgtggaaattataggaagaattcttcctattttgcaaggaatatttatgaataactcttccttttttggcaaccgattgaaagaagaaagaaaaaaattaaaaatgactcaagctgaaatcgctgaaaaatgtggggtttcaggaagaatgtggggggattatgaacgtggcatcagccagccaaaagcggaacttttcttccaatttgaaaaggtgggtatagacgttcaatacgtcatgcacggcagacgcggcgaaacagcggtcatgccgtctgaaaccctgaacgccgaagaacaagaactgctggtcttgttccgcgaggcggcagctgccgaccgtgaaatgattctgatggttgcgcgcagggcagagaaaaaagcccaaactgcgcttggtaaagtgagtaatggataaaatggatcaattcgaattgtgccaaaaagaacatgtcaatccatttgccttgtcaaagcaatatctattggttgtaacattcgtcaaatccagcagtaaaaattttcaggcagcattactttgggcaagaagtgccaaattatttgagaatcttgagattggaaaagaaaccatctattgctgcgctttcgataaaacagcagaacaggctgggatggccggggtatttttgaattatattgaaaattggaatggcaaacagatttacatcaatggccgaatccatagtggcagtatttatgatttgttaggggttttagactgctatcaaaaatcacagtcctgtcccaaccctaaaagccactgttgctttgtttcagacgacatttttctatggcatggatcaagaccaacgtttgaaatcagtcttgatctaactggaaagaaaaaagaaacatcctctgcaaagaaatttgtgatgccttgtattaatttccgtcaccataggattgaaaaagaaacctacttaggaaattggaatgaacaaattgccgcattggcagtaaaacaaaatatagattggtgtccaagttttgatattgagaattttagacagtatgaataattactatctatataggaattgcagcagcgatgtgttatgggtcaaacgtatccaacgccaaatcgacggcagcctactcttgatttctgacaattcaacctatccacccatgcccttggcactggcggaacaccccgatattcaaatcatcgggcaggtagtgcaggtatcaaaagacttgaactagacacaatcaaaaagggaaatagaatgaaaatactcgctttattaattgccgctacctgtgctttatctgcgtgtggcagccaatctgaagaacaaccggcatctgcacaaccccaagagcaggcacaatccgaattaaaaaccatgccggtaagctataccgactatcaatcagcagccaataaagggctgaatgaccaaaaaaccggtctgacccttcctgaacatgttgtccctatcgacaatgcggaaggaaagaatctgctgcatgacttttcagacggcctcacaatcttaaccgttgataccgataaagccgacaaaattactgctgtccgagtagtctggaatacagatgcaatgcctcaaaaagcggaaaaactgtccaaagctgccgcagccttgattgcggcaaccgctccggaagaccgcacaatgctgcgtgataccggcgaccaaatcgaaatggcgattgacagccataatgcgcaaaaagagccaacccgagaatgggcgcgtggtgggattgcttataaagtcactgttaccaatttaccgagcgtggttttgacggcaaaagctgagtaaatctattaagtagaaaaaatagaaagggaaatgatgattgagaaaagtatttctattgtagatggaaaggaatactccgtttttgctgtatcacacgagtttcgttatacctttgatgagcctattttagtcgctgacttgattagttctctaaaagcttatgaaacactgacaagtagttatcttccagcaattttgaatcagctgtttgatgtcaaaatccaaaaaatcaaagtagctgtatctgaaattgaaagaggatctttccttgaaaaactgattttcaatttattcttcaaagatgaagatgcttataatgaattttgtcttaaaatacgaaaatttctaggaacagaaaatcaggacggaagtattaatatgtccaaaatcattatgtttgcaatgactacacttttaggggtaggtgctggttatctcttgtttaaaaacccgccacaagagaagcaggcaataaccaacaacatcgttaccgtcattaatgctgatagttctgtcgcactggatggtgaacatttggtttcagtggtaaaagaagtaacaggaagcagcaagcaaaaaactgcagaaaatgtggcaaaagtatatgctccagcaagtaaaaataatggcagtattacccttgggacagatgatgttcggattgaacctgttgcacaacaaactgtagcaactttgcctaaagatgtggacttacgtgatacgccattgactgaagattacaccgatattgatgtgcaaattcgtgctactgaccgtgataaaaattcagggtggtatgcagtcatagaccaaattgttccatcacgtgttcgattagaactgcctgaagatattgatttgaataggctggctaacaatgctactatccgtgcaaatgtaacagttgagtttgacttaaagcaaaatggctctcgtaagcctaaaaaaatcatcctcacatctctctctactgattaagttttaacccgtattaaaggcttagtcagacggcctttcctacaatccctgtattgatttttaattcaatacagggatttttccatgtcagacaagttcaaccaattcatcaaccgcgtcctctctcacgagggtggttacgccaaccatcccaaagaccccggcggcgaaaccaattggggcatcactaagcgcaccgcacaggcaaacggctacaacggctccatgcgtgccatgacgcgtgaacaggcaatcagcatttaccgtaaagcgttttgggagcgttaccgcgccgaccaaatgccggaagcggtcgcgttccaattttttgatgcctgcgtcaaccacggttacggcaatgccgcccgtatgctgcaacgcgccgcaggcgtaccggacgacggcgttatcggagcagtcagcctcaaagccatcaattcccttcccgaaaacgaccttttattgcggttcaacgccgagcgtctggtcttttataccaagctcggtacgttcacctctttcggcaagggctgggtacgccgtgtggcgcaaaacctgattcacgcgtctgcagataacactgattaaagggagataaaccatgtcaaaaaagtcactcatcgccctaatgaccgcagccatgcagcccgatttcagccacagcgacctaggcattcgctacgccatgccgactcagggatgttggacgcaagcccaccgcaagagcggggtagccgccgcgaaacgcgcagccaaaaaaaagcgtcacaaataaccgcctttttccgatggctgggcggcttggtctctaatccggccacaggaaaaatcagccataccaaactatgggcaaacgtcgccgcagccgccatgacttggaagttcgtgcaggcggcggacgcgcccgaatggctctagtgggcttatggcgcattggtcggcgggtatgcattaatcaaacgcggcatcgcggcgattccgcagttggcagaaatcaaaaaatccgcaaatcaggaaggggggcggcaatgattgaatttgtccgagccaaaaaacggctgctttgggcatttgtgcttttgcttgtgtggacgtgcggttaccgatacgccgccgacaaggccgaagcgaaacaaaccgccctgattgccacctatcggcattcttctatggttgcggcggaacaatatgccttgcagcttaaaaaagcgcaggacgaaaggcagcggtggtacgacttttcccaaaaacaaggaagaaagcccgtgaaaaaacagtatccgccgcaaacgaaaaaagccggctatctgaaaaccaaggaagaactgcttgcggaattggcttgccttaaagcggaaatggttgccctaaaaaagcccgatgccttaatccatgggaaagaagtgcggcagaaagaacgcaactcgtcgcagggttaaggcaatgccatccgttgaactgctgttggagattgtccttctattaccaattggccgtccaatcggcagaagacaaatatgccgatttgaaacggcatatccatgatatttatcgacgacataagggaagatacggctaccggaggattgcggcagccatccgtcacgcaggaacaccggtcaatcacaagaaagtcagccgtctgatggcgaagacggggctgaaggcagtgatacggcggcgcaaataccgctcgttcaaaggagaagtcggcaaaattgcgccgaatatcctgcgacgctgtttccatgcagaaaagccgaatgagaaatgggtaacggacgttaccgagttcaatgtaggcggagaaaagatatacctttctccgattatggatttgtttaacggggaaatcgtcagttaccgtattcaaatccgcccgactttcgatttggccggcgagatactgaaaggtgcgccggagaaaccgggatcgtctgaaaagccgatactgcattcggatcaaggttggcaatatcagatgttttttatcaaaagcagttgaaaggcaacggtctggttcagagtatgtcccgcaagggaaactgcttggacaatgcggcaatggaaagtttcttcggaacgttgaaatcggaatgtttccatacgtgcaaatatgattccgttaccgaatcgtaagcggcactgcacgaatatatccgttactacaacaacgatagaatcaagttgaaattaaaaggactgagccctgttcagtacagaactcagtccctgaaagccgcttgattaaactgtccgactttttggggtcagttcggcttcggcatttttttatccgttttgggggtaacttgtttggaaagctgcaagcttataaataaaggattacatttaagttttgggtaacctttttaaaaaaatgcgtgatgacttttgcatttttaaggcgttttttggggtaattcgtgaaaagttaccccaaaagttaccccataaatggcgaaaactcaagcatacgccagcatcctgcaacacaaaaaagccttgaaactgttgaagttcaaggcttttttgtgttgcaggatgctgctgaaaatagggtatggtggaggcggggggaatcgaacccccgtccgaaagtcctctacaaagcgttctacatacttagttgtgtctatttgaaaatcttatttccatcatgccgaccaacaggccttttggaaaccagttaccttaagtcttatttcctgccaagtaacccggtaggaaaccagtcaatgtaagatgacgttgcggtggctttcgccacacagcccattgaccgactgctgcaacggctagccttaagcggctaaagcgtaagtttcgtcgtttgcgactatttgaattcagtgttttacgggaatctgagaccccggtatgcccgcatctgcttcgcaaccctcgtcgaaaccaaggtcgcccccagaaatggtttgcaaattatacggatattgtgcggtgctgccaagtctgtcggagaaatttgtcagtcttgctgccttaatttgcgtttgagcaggatgcggacgcagccgtcgttgccttcccggggttcggcgtaggcgagtacgtcggggtgttgcatcagccagtttcgggtcatatttttcagaacgggtttgtagcctttggaacctaatccgctgccgtggatgatttcgccgcatacgccgcgtttttgggtgaatgcgatgaattcgttgaggactttttgggcttcttcctgtgtgtagccgtgcaggtcgacatcggtaacgacgggatagtatccgtttttcaggcgttggatgtcgttttttccctgtccgtttttgctgaagctggcgggcgggtcgttgtatgtgctgccgatgtagaagtagttttcttcgtcggcgcggttgtctttgggacggactttgatgggggttttgtcgggcggcgcataatattgctgccggttttttaatggggagagttgtccgactgcttgtgaaaaatcgaaatcctgttcttgtttttgcttgtttttttcggctgcctgtttttctgccgcttctttttgggcttgtttgcccagttgtttgaggatgttttggaagtcggtattcatattttttcctgttatttgtccgatggctgtttcgggcggggttttaatttgccggaatgtttgccaatcgggggaggatgattttgttgcctgcgtatgttttttgaaagtgtgattgtatatcaaaaagaaatgcggcaaccgtcggcagtgttgattgccggaaatgcggaccggtcgaaccgatatgcccgaacgcctgataaagttttaaaaacctgccttgcgaagcaggctgacgtgttttgccaatcttgaattgccggaaacgcgaaacacggaaatctgatgttttatagtggattaacaaaaatcaggacaaggcgacgaagccgcagacagtacagatagtacggaaccgattcacttggtgcttcagcaccttagagaatcgttctctttgagctaaggcgagaacgctgtactggtttttgttaatccactataaatgttccgatacgaactgcaaaatattggttttgtttctgacaggcaaaagcactgtttatttggctgtcaaaaggatggttaaggaaagttatgcgcccctgaagcgggccccagataaggatggttgcgccgacggcttcagacggcattttggcggcggtgttgggttttgtatccggtttgccgttgtgttttgtgatgatgattttgggcgcggtttttctgttttgatgtgtgaaatgccgtctgaaaggcggttcagacggcatagcggtcatttttgtgcggtcaggcggtcgaatatgccgccgtcggcgaagtaggttttcatgatgttgtcccatccgccgaattttttttcgggagagaaggtgtctaagtctgggaagtcggctttgtgtcttgccaatacttcggggttgcgggggcgcaggtagagtgaggcggcgagttcttgcgccggttcgctccaaaggtattcgagataggcgcgggcggttttttgcgtgccttttttcgcgacgacgctgttgacgacggcgacggggctttcggcggaaatggtgtagctcggatagacgatttcaaactgtccttgggtcagttttttgctgacgtagttggcttcgttttcaaaagtgatgagtacgtcgccgatgttgcgttgtgtgaaggtggtggtggcggcgcgtccgccgttttcaaaaacgggggtgtttttgaggatggatgcgacgagtttttgggcttcctgttcgttgccgttggtggttttcagaccgtaaccgtatgcgccgaggaaggcgtagcgtccgttgcccgaggttttgggattggcgatgacgatgttaacgccgtctttggcaaggtcgttccaatcgcggatctgtttggggttgttttttcggacaaggaaaaccatagtgctggtgtagggcgcggcgtggtcggggagggcttgttgccagcctttttctaccagtccttttttttcgagcaggtcgatgtcggaggattggttcatggttacgacatcggcttgaaggccgttggctacggataatgcctgtttgctggagccgccgtgggactgttggatgctgacggatgtgccggggtgttcggattggtatgttttgataaataaggggttgtattctttgtaaaaatcccgtgccacatcgtatgaggcgttgagcagggtaatgttttttccgtcggattcggtattggccggggcattttgtccggacggatggtttgaatcggctgcggggctgcaggcggtgagcagggctgcggtatagagtgccggtgcgtaggttttcatatgcttgtcctgtcggttggtagatggggcaactttatacggctgtctgcgcttgtggaaataatgtttgatttgaagattatcagttttggttataaggacggatcagaggtgtttccgcatcagttcgcatttgattttgatgctggggtcaagctgcaatactgccgaaccgagcgattcgtagcggttgagaaggtaaaacgggacggagttgagcgatgcgtagagtttcagaaagctcaaaccggatttgtgggcgatggtttccgcctgatgaagtagggcagtgcccagtccgaggttgtggaacagggggtggacgtaaagtgcatcgagttgtgcttcttggcagtcgatttggaaaaatccctgtatgttgcctttgtattcggcaacccaaagtgctttgtcgggatcggaaatggtcggcaggtagctttctgtgtttagcaagccttcccatacttttagggcgtgttcgttgtagctgaggatgcaggtgtattggacggagtgcaggtggactttgaagatgtctttgcagtcttgcacggtggcggggcgtaacagtgtcagcaggctcatggcggtatgtcggcggcttcagacggcatctgtgccgttggtcggattatagggactgatgcagtttttttgcttcttgaaatgcggtgtccgaatcggtggttaaaacggtaaagtgtcccattttccgccctttgtgcgcggtttttttgccgtaaaggtgcaggtgtgcattcggatggctttgcaagggcagccaatccggttcgccgccgtcttcctgccaaacgtcgcccaaaatatttgccatacagcaagaactcagtaatttggtatcggcaggcggcaggttgcacataatgcgtacctgctgctggaactggtctgctgcgcaggcatctatcgtatggtgtccggaattgtgcgggcgcggggcgatttcgttgacgaccaattcatgcgtgtcaccgacaacaaacatttctaccgccaatacgccgacataatccaattcgtccgccaagcgttgcgccatctgccgcgcctgttgctgcacgtcggcactcagtcgcgcggggacgatggaataagccaagatgccgttttcgtggatgttttcggcagggtcgaaagtttgcacgttgtcattgttcaaacggcatacgattacggaaatttcactgcgcaaatccaccattttttccaaaacgcaatccacgccgccgtgttcggcaaacgcggctttgagttcatccaatgtttttacgcggatttgacctttgccgtcgtagcccaacgtagccgttttcaggatgccgggcaaaaattgcgcgcttgcttcagtgatgtcttcagccttacaaaccacttgatacggcgcggtttgcaatcccgctttgcgtatccatgccttttcctgaatgcggttttgtgcaatcgccacacaatcgccgctaggggaaacattggtatgttttgccaaaaagcgcatcgcatcggcattgacgttttcaaattcagtggtcaccgccgcgcattttgccaattcgtccaaagcagcttggtcgttaaacggcgcgcacaaatggcggtcggcaaattctgctgccggcgcgtccggatcggggtcgagaacggttactttgtagcccatggttttggcggcaacggtaaacattctgcctaattgtccgccgccgaggatgccaagcatggcgggcggagaaagagatatgtttttcatgctgactcttcaaattgtacaagttgatagctataactaattcttgacggatgtcttgtatcgctggaattaccagtttcagaaatacagaatactttttccataaatttttctgcttttagaaattccagtattctgtttttttcatccttataagcaccgcggtctgtaccccatgcaagaataatcatatcagcatcttccaaacatcctttaaatttggaaaaatcggtttgggtgtttgccctaattcctgtttgctgtgtagagtaactggaaaaaatatttaacattttgaagttggtaaaaccgtacatatccaagaaacgtgcaagttgggtaagggttttgtcgcttctttcatcatttgctttacttggattaattcctatagcgacagctgagaaatttttaggattttctgtgttgccgctccatctaaccgttaggatttctcgatttttttcattatctgtatagagaccgtctttggtagtcggtctgagtgtttggcgaagctcataaagtttttcataagtcatttatccaacccttcctgtaccatttgcgcggcgtgtatgacggctcgggctttgttttgtgtttcctgccattcggaggccggatcggagtcggcaaccacgcccgcgccgctttggacgtatagcgtgttgttttttactacggcggtgcggatggcgattgccaaatccatgtcgttgttgaaaccccatacgccgacggcaccgccgtagatgccgcgtttgctcggttcgacttcttcgatgatttccatggcgcggactttgggtgcgccggagagtgtgccggcagggaaggtagcggcgaggatgtccatgttggtcatgccgtctttcagacggccttcgacgttggaaacgatgtgcattacatgggagtatttttcaatcaccattttgtcggtaactttgacttcgccggttttactgatgcggccgacgtcgttgcgtcctaagtcaatcaacatgacgtgttcggcgatttctttggcatcgcttaacaaatcttgttcgttggcaaggtcttcggcgggggttttgccgcgcaggcgcgtgccggcgatggggcggacgataacgtcgttgcgttcgcgtcggacgaggatttcgggcgaggagccgacgatgtggaaatcgccgaaatcgtagtaaaagagataaggcgaagggttgagcgtacgcagggcgcggtagagggcgagcgggctgtcggtgaattccatgctcatgcgctggctggggacaacctgcatgcagtcgcctgcgaagatgtagtctttgattttgttaacgcaggctttgaacggctcttcgccgaattcgctgacggcttcggtgtgtttgctgccgagcgagagcgggatggcgcagctttggcgcaactgggtgcggatgtcttcgaggcgttcgcgggcgcgttcgtagccgtcgggctgcgacggatcggcgtaaacgacgagatggattttgccgctcaaattgtcgatcaccgccaattcttgcgacagcatcagcaagatgtcgggcgtgccgagcgggtcggctttggtggtgtttttcaggcggtgggcgaagtgttcaaaattgtagatggtttcgtaaccgaagtagccgaccagtccgccggtaaagcgcggcaggcttgggatttcgggtgttttgaagcggttgtggaaggcttcgataaagggcagggggttgccgtcgtgttgctcgacaatttcgccgttttgataaacatcgacgtgtttgccgctggctttgagatagtggctgcaaggcaggccgataaaagaatagcggccgaaacgttcgccaccgacaacggattcgagcaggtaggtataggggcggttggcgagtttgagatagagggaaagcggcgtatccaaatcggcaaggagttcttgcacgagcgggatgcggttgtagccttgggcggcttgggcttggtattcttgtttgctgatcatttctgctttcccaaagggcggtttcggacggcgcggcaacgggcgcgagtatagcattttatcggaattgttgacagtctgaccggagatgcccttggattcggatttcaagtgcaacactagtgtattagtggttggaacagattcaagaataaaacacttggcgtttcgtagccaagtgtttttcttggtcggtggttcaactcatcttgaaccctgcgtatctcccgatcactgatgttacggaaatcggtttgtttggggaagtattgccggatgagtccgttggtgttctcattcagccctttctcccaagaatggtaagggcgacaaaaataagtctccgctttcaatgctttggttattttggtgtgttggtagaactctttgccgttatccatggtgatggtgtgcaccctgtctttatgtgcctttaatgccctaacagctgcccgggcagtgtcttcggctttgaggctatccaatttgcagatgatggtgtagcgggtaacgcgttcgaccaaggtcaataatgcgcttttctgtcctttgccgacaatggtgtcggcttcccaatcgccgatacgggatttctggtcgacgatagcgggtcggttttctatgccgacacggttgggtactttgcctctggtccatgtgctgccgtagcgtttgcggtagggtttgctgcatattctgagatgttgccacaacgtgctgccgttgcttttgtcttggcgaaggtagcggtaaatggtgctgtggtggagcgtgatctggtggtgtttgcacaggtaggcgcatacttgttcgggactgagtttgcggcggataagggggtcgatgtgctgaatcagctgcgaatcgagcttatagggttgtcgcttacgctgtttgatagtctggctttgccgctgggctttttcggcgctgtattgctgcccttgggtgcggtgccgtctgatttcgcggctgatggtgcttttgtggcggttcagctgtttggcgatttcggtaacggtgcagtggcgggacaggtattggatgtggtatcgttcgccttgggtcagttgcgtgtagctcatggcaatctttcttgcaggaaaggccgtatgctaccgcatactggcctttttctgttagggaaagttgcacttcaaatgcgaatccgccgccgtctgaaacgccaaacgggcttcagacggcatttttgacggcggaggtctatgagccgcaggttttcggcttgttcgccagaatattgatgactttgcgttcggctttttgcggctcgattttgatttcgctctcgtcttcttcgctgccgtctgaaaaacgttcgggcattttttcgctgtcaaacgccaaatcgccgccgtgtttcaggctttgaccgcgttccaatccgacaaagtcgaagagttcggtatcggcaaggtgggaagggacgacgttttgcagggcggagaacatcgattcgatgcggccggggaagcgtttgtcccaatcgcgcagcatatcgccgatgacttggcgttgcaggttgggttgcgagccgcagaggttgcacgggatgatggggaattgttttaattcggcgtatttgattaagtctttttctttcacatacgccagcgggcggatgacgatgtgttcgccgttgtcgctcaccagcttgggcggcatggctttgagtttgccgccgtaaaacatatttaaaaacaaggtggcgaggatgtcgtcgcggtggtgtcccaaggcgattttggtgcagcccaattcttttgcagtgcggtagaggatgccgcggcgcaggcggctgcacagcgaacaagtcgttttgccttcgtctaatacgcgtttgacggtggagtaggtgtcttcttcaacgattttgtagggaacgccgatgctttcgagataggtcggcaatacttcttcggggaagcccggctgcttttggtcgagattgacggcaaccagttggaaatcaatcggcgcgctggcttggagctggcgcaggatgtctaacagggcatagctgtctttgccgccggagaggcagaccatgattttgtcgtccggctcgatcatattgaaatcgttaatcgcgtcgccgacggcgtggcgcaggcgtttgctgagtttgttgttttcgagttcttgtttggtttttttggacatggcggtttgggtttgaaaattagaaaggcggcattgtaaccgattggcggggcggcaatgccgtctgaagggcttcagacggcatcggcggcttattctgcattttcggttttaaagaagagatgaaccgctttgaagataccgccgtttgggacggtcagtgttttttgtgcggcggagaatttaatcacggtaagggcggtaaagttttccgaatcttgaacgctgtcgagtacgatgccggcctcttcgccgtccgccgtcagcagggttcctgcttcgacggccgaatttcccgacaataccgccaagccgcgtttgacctgcccccgatactgggcacgggcaatgatttcctgtcccggatagcagccttttttgaagtgtacgccgccgatgatgtgctggttgagcatttgggcgacggcggtttctttggtagccgcgcatatccacggataaccgctacggatttcgtgcagccgccacgcgttttcggcggcggcatcataaggcggcaaggcgtttttgggggcgatgtgcaaaatgccccgatgtggcaggacgacggaacagatgccgtctgaaccgcattcggcggtaaaggcgaggctgggttcttgcgcggcaagcggttcggcggatgcttctaattccgcgccgacggcgtaatcttcaaggatttcaaaaacggctttggcgcgtaacacaaacatccgcaaacgtttgaccgttgcttcaagcaggtcttgcgccataatcagcagcaaatcgccgcctcggttgacgacaatcatattggcgatgacgcggcctttgggcgtgttgtaagtcgcataacacgcctgcccggtctgaaggtggttgatgtcgttggaaagctgtccgtgcaggaaggtttggcggtcttcgccgctgacgcgcaccacgccgaaaaagggcagtaaggttttcatcatttgcgtactctgaaatataaaggaaatctgtttatgcagttgccgcgtctctcttcacggcggttattttgatttcgacgcgccactccggacgggcgagccgtgcttccacgcaggcgcgggcgggcgttctgccggcggcaacccaagcgtcccacacgccgttcatttccgcatagtcgcccatatcgcgcagatagatgaccgcatccaaaacgtgcgctttgtccgagccgcattccgccagccagcggtcgatttgggcaagcacgtcggcagtctgttcggcagccgtttcaccgttttcgggaaccatgccggagaggaaaatcaagccgtttgcgccgacggcttcggaatagcggggcgttgtgccgaaatatcggatatccatatcggtttccttcgataaaggggatatatggtaacattgcgcttgaccgatttccatgttttgcatgacgaaaaatgagtaaacacacttatccgataacacctgccgtgcgcgttttgcgtgaaaacggcatcgaatttgaaccttttacctatgcctatgaggaacacggcggcacggcgcagtttgcccgactattcggcaaagacgaacacttggtcattaaaaccattgttttgcaagatgaaaacggtaaggggctgattgtcttgatgcacggcgacaagcagatttcaacccgcaatctggcgcggcatttgggtgcgaaacacatcgaacccgccacgcccgtacaggcaaacaagtggacgggctatctggtcggcggcacaacgccgttcggcatccggacaaagttggatatttacgtcgaacagtcggtgatggatttggaaaccatctatatcaacggcggaaaacgcgggttcattatcggcatccgtcccggagatttaaatattttgaacccgaaaacaatacaggcggcggtttgacgggaaagtataaaggaacaatatggacaaagatttgtatgccgtattgggcgtgtcgccgcaggcgggagcggacgaaatcaaacgcgcctaccgcaagctggcgatgaaatatcatcccgaccgcaatccgggcaatccgaaggcggaagaaaagttcaaagaaatccaacgggcttacgatacgctttccgacctgtcgaaacggatgcaatacgacgcgtccttcagacggcatgaggaacgcgggcggcaggaagaggcattccgccgcgaacaggcgcgcagggagcagttttaccgcgaacagatgcgccgcgaacaggcgttcagacaggcgtttgaacggcaggcatcacgttcgtgccatacttacgaaccgtccggcggcggaagcgggcgcaactatgtcctcgccgcctacatcctgttcggtttgggtgcaatcatgctgttcatgcccatagtcggcgtgattttcgcctatatgcccatagtcggcgtgattctcgcctatatgaaacggaacagtttggacagcattgtctatgccgcacataccgaatacctgattaaaaccttttggcgcacattttggctttatattttgggtgcgctgactgcccttttgggtatcggcgtgctgattattattgcaacgaacgtctggtatttctaccgcatcatcgccggctttatccgcttcaacggcggcagggcggttgcacccgagaaatggatatagtatggcttacctgttaatcagcatcgtgttcagcgtgtcggtttccattttgctgaaaatggcaaggaagaaaaaaatcgacatcgcgcaggcggtcgccgtcaattatgtggtcgcggtcatactgaccctgctggtattgaagccggatatcggcaatatcggcgcatttttgccgacgtggccgctgtttgccgctttgggcgtgctgctgccgtccgtattcgtgataatgggcaaatctgtggaagccgccggtatcgtcaaatccgacgcggcgcagcgtttgtcgctgtttttgccgattgttgccgccttgacgctgtttggcgaaaaactcagcgaaggcaaactaatcgggctgtgcctcgcatttgccgcactgttctgcctgctttggaaacacagcggtggcaaaaaatcaggaagcgcgtggcggcaggcggcattgctgctgggcgtgtgggcaggttacggcattatcgatatcctgttcaaacagcttgccaaaagcggaacggcatttgcgggcaacctgctggttgcatttgtgctggcgggtgtgctgatgtttgcctgcctgtttgccaaatcggtcagatggcgtgttgagagtgtggtcggcggcatattcttgggcggtttgaattttatgaatatcgtaacctacatcaccgcgcaccaaatgatgaaggataatccgaccttggtttttgccggtatgaatatcggcgtgattgttttgggtacgctttcgggcgcattgttctttaaggaaaaaatcaacacaatcaatacggcgggaatcgtgttggcactgtgttctatcgcctgcctgttttattggggggaagtcaaggtactgttcggcatataatccggctgattgatataacaaaatgccgtctgaagcagcatccctgcttcagacggcatttgtctgcaacgttacagatgggggttcatcaggttctcgggagagaggatgcggttgagttcttcttcgctcaacagcccgcgttccaagacaacctcgcgcacgcctttgccggtttgggcgcagattttgccgaccaaatcgccgttgtggtgtccgatatacggattcagataagtcaccaaaccgatggagttgaaaacgtaacgttcgcagatttcgcggttgaccgtaatgcctttgacgcatttgtcggacaggttgactgcggcattgcccaagagggaaatggtttcaaacatacattgggcgatgaccggctccatcacgtttaattgcagttgcccggcttcggcggcgaaggtaatcgtcgtgtcgttgccgatgactttgaagcagacttggttgaccacttcgggaatcacgggattgactttggcgggcattatggaagaaccggcctgcaattcgggcaggttgatttctttcaagccggcacgcgggccggaagagagcaggcgcaagtcgttgcagattttggagagtttgaccgccgtgcgcttcaatgcgccgtgtaccatcacatatgcgccgcagtcggaggtcgcctcaatcaggttttcggtcagtttgcaaggcaagccgctgacttcggagagttttttgaccaccagttcggcgtagcctttgggcgtgttcacgcccgtgccgattgccgttgcgcccaaattgacttccaacagcagttggcgggtgcggtcgaggttgaggatttcttcttccaacaacacttggaaagattggaattcttggccggcagtcatcggcacggcatcttgaagctgggtgcggcccattttcaaaacgtctttaaattcttcggctttggcggcaaaggcgtttttcaggacagtcagtttgtcgagcaattcgccgatgctgtaatacacggcaaggcggaagcccgtgggataggcatcgttggtcgattggctggcattgacgtgatccatcggattgacgatgtcgtagcggcctttttcgtatcccaagacttccaatgcgaggttggcgatgacttcgttggtgttcatattgaccgaagtacccgcaccgccctgatacacgtcggacgggaattggtcgaggcagcggttgttcagcagaacttcgtcgcaggctttttcaatggcggcggcgatttcgggcttgaccgcgcccaactcaccgtttgcctgtgccgtcgcctttttcaccatcaccatactgcggacaaactgcggcacgtcagaaattttttgtgtggagattttaaagttttcaatggcgcgcagggtgtggatgccccaatacacttcggcgggaatctcgcggtcgcccaataaatcgtgttcgatacggacagtcatgtttttacctttgtaagtcggataattaatattgaaaaaatgcgccatcggaaagatgccgccgcaggatgaacactataccggccggatgaaattgtccatatcgtatgccgtctgaaaacgggaaacgttgttttcgggtgttatagtggattaacaaaaatcaggacaaggcgacgaagccgcagacagtacaaatagtacggaaccgattcacttggtgcttcagcaccttagagaatcgttctctttgagctaaggcgagccaacgccgtactggtttttgttaatccactatactttccggactttccggcaagccctgcctgccgctgaaatatctttcggcggattgtgctccgccatatcggcttaccgttggcggggcggtttgatgaagacggcacaaatgccgtttgaaggacgttcagacggcatttgtgctgattcgcatcaagatttattgtttggctgcctcgatttggatgtcgatgcggacgcttttggtcataccaacgttaacgaggtagtccatgccccatttggtgcggtcgatggtggtgctgaagtcgccgccacaaacttcggttttctccatcgggctttggtagcagttgaatttttcggctttgagtttgacgggggcggttttgccgtgcatggtcaggttgccgtcaacggaaaccagttttttgccgttgaagttgaatttggtggaaacaaagcggatgtccggatattgggcggcatcgaagatgtcggctgatttcaggtggtcggtaaagtgttgcgaaccgctttgcaggttggcaatggggatggtgatgtcgattttaccgtcgcgttttgcttggtcgaactcgacggaaccggtcagaccgtaaaaaccgccgacgttggtgctggtgttgaaatggtcgatggcgaaacgggcgttggcgtgatattcgtccactttgtaggtggcggcggaggcagtactgatggcggcggctgcgagtgcggcgaagatgatttttttcatgatgataatcctttgtgtgggccggtaaaggcgtttatcctaacataggcagggatttatggcatttcctgccggtaaacggtgggtttgcaggcggttgacgaacggggcgggcggaaaagggcggatgaaaaagcgcggtgtgatccgcgctttgtttttttacaaggcggcgagtaccgcatcgcccatttcggagcaggaaacgagttttgtgccttcttcgtaaatgtcgctggtacgcaagccttgttgcagcactttttggacggcgttttcaacttgttgcgcgcgcgcttcgtcgttcaggctgtaacgcagcaacattgcgagcgagaggatggtggccagcgggttggctttgttttgtccggcgatgtcgggggcggagccgtgagacggttcgtacaggcctttgccgttttcgtccagcgaggcggaaggcagcataccgatggagccggtcagcatggaggcttcgtcggagagaatgtcgccgaagatgttgccggtggcaatgacgtcgaattgtttgggcgcacgcacgagctgcatggcggcgttgtcgacgtacatatgggaaagctcgacatcagggtactctttgccgatttcttcaaagatttcgcgccacaattcggtggtttccaaaacgttggctttgcctacggaacagacttttttgctgcgtttttgggcggattggaaggcaacatgggcaatacggcggatttcgctttcgctgtatttcatggtgttgtagccttcgcgttcgccgttttccagaacgcggatgccgcgcggttcgccgaaatagatgtcgccggtgagttcgcgcacaatcaaaatatccaaaccggcaacgatttcaggcttcagcgtggaggcgttggctaattcgggatataaaacagcaggacgcaaattggcaaacaggttcaaatccttacggattgccaacaggccgcgctcagggcgcaacggacggtcgaggttgtcgtattgaggagaaccgactgcaccaagcaggacggcatcggctttgcggcagaggttttgcgtaaattcgggataaggatgaccgtattcgtcataggcttcgccgcccaatggggcgtattcgtagccggcatccaaaccttgggcgatgagtttgtcgagtacgcggacggtttcggcgacgatttcgggaccgatgccgtcacctcggaggatggcgatatgtttggtcatttcaagtttccttatgggttgatggttgaagggttatttctttttgtatttgtgtgcaatttcgtgccaacgaggtatggaaatcgatcggttgtagtgttttttataggcttcctcaaatttctttttccataaggatgcgttatgccgtgttgccgggttttgataaacggtttcttcaattgcggaaacaaaatcttccaagcattcaaacataggcatattctttttatttatgctgtaccaaacacccgggcggattttatgcaccacgccttttttgacttgaagattaattgcccacccatccatgcttctcgtaatttgccatacttttttaagccataaatccttgatggttacattgccgttgtcgtccatatcgtaaccgaatattaaatagtctacatccagcatatagggtttatgaatgatttcatcagaatacattttaaaatctgcaatatcaaaacccggactggcatttcggttgaacgcctttacttccaacaattctctactgcggtcttttttatttaaaaagaaatcggggggcatttgggtattggttgaaacatcaaattcaatttccctttttctcaaccatccgccgagccattcctgaatgatgttgccgacgacatctttttgtttgacgataatatccacatcgcccaagaaaaatctaatttgaccattgaccgataagattttttcctcattcagcaacttatcaaatatttgttgtgcagtaagttttaccattttatccctatcggtttataaagtatgcagaagcctttcagataccgccttaatcacaggaacggcaacggtattgcccaataaatcgtatttgtcttttttaggaatatcaaacgaataatcgtccggatagccgaataagcgtaaaccttcttttccggtaagtgtgcgcaaaccgccgttgtcaacgacgaaaaggtgctccatatccattgcaactaaggttggcgcaacatcatttgggtctaatattttattgatttcaaatgatttttttcctgaaacaatattgtagcctttgggcagggattcatctttgattcttcgcccgccaattttttgtttcggatgctccaaaaccaaatagcctttatctgtcaggctgtccaaaatattttgaagattggggtgtttatagaaagttgaaatttgcgcttttgtcaaaggcatcccatccatccaatcgatgccgatttctgaagcccattttttcttcctccgttcttttagaagcatatttaataattgcttctcttcttcggttactgtgccttttaattcaatatcccaactgtggatattgtttttccctccccgtttgtcctttactgattttccgtacagttcggacgggggaaatttctttagcaattttttgatgaaaggactgctttcggtaggcagtcccgattccaaaatattttttaatttcggacttagggttgtttcaaaagataagtcgggtttggatttcaaactgcctgtcagataaatacgcttcctgttttggggaatgccgaaatcttttgcatttaaaactttccaagaaacatagtagcccaatgtttccaaggtttccaaaataacggtcagggtgcgtcctattttttgtgtcggatcttttctatcgtgcgtcaccaatccttccacattttccaaaataaaaccttttggtttttttgcctttaaaatccttgccacatcaaagaaaagcgttccccgcgtatcttcaaagcccaatctttttccggcgaaagaaaaagcctggcaagggaagcctgccaacaagatgtcaaaatcgggaatatctcccgtttcaattttcgttatatctccatacggcacttcatcagggtagttttgcttcaatacttccaaagctgccggtttgatttctgaggtaaaaacacattcgcaagcaaccgactgtttccgacaggcttgttcaaatcctttcctgataccgctcatcccggaaaataagtcaataaatttaatttgttgcatattaaaaatctaaaaatttatttgaaatggagagttgcattattgcattaatttagagtgtcgctaagcccgcttaaaagatgaaagcaatttatcgcccctctgtttacattagccgcaacaattatatgttatcaggaatgccgtctgaacggccttcagacggtataggttttaaccgttaaacagccaaggctggctttggcggcgtttttcttcaaaggcgtgaatttcgtcggcgtgttgcagggtcagaccgatttcgtccaagccgtttaagaggcagtgtttgcggtgttcggtaatgtcaaatgtgaacgtttcgccgcttggtgtggtcagggtttgttcggcaaggtcgatggagagctgatagccttcgttggcttcaacttctttgaaaagtcggtcaacccgttcttcggtcaacacgataggtaaaaggccgtttttgtagcagttgttaaagaagatgtcggcgaagctgggggcgatgacggcgcggaagccgtagtcgtccaatgcccaaggggcgtgttcgcgtgaagagccgcaaccgaagtttttacgcgtcaacaggatttgcgcgccttggtaacgcggctggttcagcgagaaatcagggttcaacgggcgtttgctgttgtccatgcctggttcgccgtggtcgaggtaacgccattcgtcaaaggcattggggccgaagccgctgcgtttgatggattttaaaaattgtttggggatgatggcgtcggtatcgacgttgctgcggtcgagcggggcgacgatggcggtaattttggtaaaggctttcatgggtttgcgtcttgtgctgacgatgccgtctgaagcggtttcagacggcatcgcgaatcggttattcggtggcgttttcgatttttccgccgagatgggaaatgccgcgtccgacggcattgccgccttttttgacggcttctttggttttgtcccagcctttttcgacggcgttgcctgtttgttcggcggcgcgttcggcggcggcctgtgttttgtcaaggttgcgggcggtgtcttgtttcgcgccctcccaagtgccggcgcaggcggacaaggcgagggcggacagggcggtaatgaaaagtttgttcatggttaaactccttggtttgaatattaaaggtgtttctgccttacgggacatatttcagacggccgcgtcaaattcttaaagaccgcctgaaaatacttacgccatcatgcggatgtcggtaaagcggccggtaacggcggcggctgctgccatagcggggctgacgaggtgggtacgtccgccgttgccttgacggccttcaaagttacggttggaggtggaggcgcagcgttgccccggggtcaggcggtcggcgttcatggcgagacacatcgaacagcccggttcgcgccattcaaaaccggcttcgatgaaaattttgtccaagccttctttttcggcttgttctttaaccaaaccggagccggggacgattaacacgcgctgtacgttggcggcttttttgcggtctttggcgatggcggcggcttcgcgcaagtcttcgatgcggctgttggtgcaagagccgatgaatacgatgtcgacggggatttcgtttaatggcgtaccggcttccaagcccatgtattcaagggcgcgttccataccgctgcgtttgaccggatcggtttcttcggcaggattcggcactttgctgctgatgtctaaaaccatttcaggcgaggtaccccaagtgacttgcggttcgatgtcttcggcgttgaaacggtattctttgtcgaataccgcaccttcgtcagacaccagcgtacgccagtactcgacggctttgtcccacgcttcgccttcgggtgcgaagggtttatcttttacgtagtcgatggtggtttggtcgacggcaaccatgcctgagcgcgcgcctgcctcaatcgccatattgcataaagtcatgcggctttccatagaaaggctgcggatggcttcgccgccaaactcgatggcgtagcctgtaccgcctgccgtgccgatttgcccgatgatgtagagcgccacgtctttggcggtaacgcccgcttttaatttgccgtcaacggaaatcagcatggatttggattttttcgcggtaatacattgggtcgccatggtgtgctcgacttcggaagtgccgatgccgtgcgccagtgcgccgaatgcgccgtgggtggaagtgtgcgagtcgccgcagacgacggtcataccgggcagggtcgcgccttgttcggggcccataacgtgtacgatgccctgacctttgtccataaacggaaaataggcgagtgcgccaaactctttaatgtttttgtccaaagtatcgacttgcagcttggaaatcgggtcttggatgcctttgtcccaatcgccggtcggggtgttgtggtcggcggtggagacgacgctgtcgatgcgccacagcttgcgccccgccattttcaagccttcaaatgcctgagggctggtaacttcgtgcaccaaatggcggtcgatgtagagcaggacggtgccgtcttcttcttcgcggacgacgtggctgttccaaagtttgtcgtagagggtttgtgctgtcatgatgttgttcttttggataaatggtaatgcggattgggcggattttagacgtattctttataccgcgcaacagattttgtctaatttttgagtcggtgttattttgtaaacaattttaacaaaaaaattagacatattgtccatttcagtaagcagttatatctaaagcatgattcgatacgaaagaatacttgtcgtcattctttcaaaggcattatcatctgcatcttgtcaaaaaacacacagaggtagacgaaagatgaaattaccggtgatgtcgcccgaacattcggcgcaacttcaggcgtttgaggcaaaaatcctgtccaatcacgccaaaatcgaggcgtggttccgcacgcagtggagcgtacaccgcccgccgttttacggttcggtcgatatacgcaatgccggttacaaaatttcgtctatcgatatgaatttgttccccggcggcttcaataatctgaatcccaactttatcccgctggcggcggttgccgcgcaagatgcggtgcaacgcgcctgcgaaacggcgaaatccgtattgattattcctgaaaaccacacgcgcaatacgttttacctgcaaaacgtttacgccctcggcgagattttgcgttcggcagggtatgaagtgcgcttgggcagcctgaatccggaagtaaccgaaccgaccgaatttgaaaccgcattgggcgacaaaatcctgttggaacctttattgcgtacccgcgatcgcgtccatcttgcagacggcttttcgccttgcgtggttttgttgaacaacgatttgtccgccggcattcccgacatcctcaaaggcatcagccaaaccgttttgccgccgttgcacggcggttggacgacgcgccgcaaaacaaatcatttcggcgcgtacaaccaagttaccgccgaatttgccaagttaatcggcatcgacgaatggcaaattaacccttattttgaaaaaatcggcggtttggacttccaagggcgtgaaggcgaagacgcgttggcggaagcggtagaacgtgtgctggcgaaaattcaagccaaatacgacgaatcgggcattaccgacaaacctttcgtcatcgtcaaagccgatgccggcacttacggcatgggcgtgatgagcgtcaaatccgccgacgaagtgcgcggattgaaccgtaaaaaccgcaataaaatggcgaaagtcaaagaaggcttggaagtcagcgaagtgattgtccaagaagggatttatacttatgaaaccttaaacggcgcggtgtgcgaacccgtcgtgtatatgatggaccgcttcgtcatcggcggctttttccgcgtacacgaagggcgcggtgcggacgaaaacctaaacgccggcggtatggtgtttgttccgctgtctaacagcattcctaccggtaacggcgataattcccaagaagcgcccgaagcctgcaagcgcgtattcgaacaatgggactcgctgggtatgccgcgctctgaaaaagactgcgacgtggacaacgaacacaaccgcctctacgtttacggcgtaatggcacgcctgtcgcttctggcggcttcaatcgagttggaagaaacggcgtaagactgttttgaaatacagatgccgtctgaagcggaaatccggttcagacggcatttcggatatttggcgtgtgggaacatctgtttcagacggcatctcagactatttaaaaaagggaaaacatgagcatcaagcaatggccggaaggcgaaagacccagggaaaagctgttggaacgcggggcggcggcgttgagtgatgccgaacttttggcaatcctgctgcgcgtcggcacgcgcggaatgagtgcggtcgatttggcgcgttatttgctgcaggagttcggcagtttggggaggctgatgagcgcggaggtcggcaaactgtcggcatacaaagggatggggacggcaagtttcacacagtttgccgtggtcagggaaatcgggcggcggatattggcggaagaattgcaggagagcatcgtcctgtccgatccggatacggtggccgattatttacgctttcatttggggcaggaaaaagtcgaagtcagcgtcgcgctgctgctgaaccgccaaaaccaactgattgcggtcagagagctgtcgcgcggtacggttgcggaaaacacgatttacatccgcgaaatcgtcaaactggcattggacgaatatgccgacagcctgattattgcgcacaaccatccgggcggctcgcccgaaccttcgcaggaagacatcatgttcacaaggcggctggcacaggcaatgtcgctggtcgatgtgtcgctgctcgaccattttatcgttacctcgcaaagcgtctgttcgttcagacagctcgggttgatgccctgacactctgttttacatgcggcggctctgataaaatagccgcttcaaccgtattcaacagatattgttaagttaatggaaacacaaaacaaacctaccgttaccgacattgaccgccctatactcgtcccgcccggtggacataaaaaagtcttgctgcattcctgctgcgccccgtgcagcggcgaagtgatggaagccatgctggccagcggcatcgactacaccatttatttttacaatcccaatatccatccgcacaaagagtatatgctccgaaaagaggaaaacgtgcgctttgcggaaaagttcggcattcctttcatcgataaagacgacgactacgaaaacgaccgcaaagaatggtttgccaaagccaaaggcatggagtttgagccggaacgcggcatccgctgcaccatgtgtttcgatatgcgttttgaaaaggcggcgcaatacgcgcatgaacacgggttccccgtctttaccagttcgctgggcatttcacgctggaaaaatatggcgcaaatcaacgactgcggacaccgcgccgccgcgccttacgatgatgtggtgtattgggatttcaactggcgcaaaggcggcggcagcgcgcgcatgattgaaatcagcaaacgtgaaaacttctaccagcaggaatattgcggttgtgcctattccctgagggattccaatgcccaccgcaaatcacagggcagaatccccatcaaactcggcgtgctgtattacggcgacgaatcgacacaatacgaacctgcccccatccgggtggacaaataaacacccgatgccgtctgaaggttcagacggcatcgggttcggcatcggcacggggaaaggtttgccggtttggcaatctgcaatcggaaaccgcattggcaagtttgccgttttgataaaacaccccgttgccgcgtcgggaggacggcattatgaaatccctttttattcggctgctcctgttgggttcggcggcaggcgttttctaccatacccaaaaccaatccctgcccgcgggcgaacttgtctatccgtccgcaccgcaaatcagggacggcggcgatgcgctgcactacctcaaccgcatccgagcccaaatcggtttgcacaagctggcacacgcgccggttttggaaaactccgcccgcaggcacgcaagctacctcacgctcaatcccgaagacggacacggcgaacaccatcccgacaatccgcactacaccgcacaaaagctgaccgaacgcacacgccttgccgggtatctctacaacggcgtgcatgaaaacatcagcacggaagaagaagccgccgaatcgtccgacagcgacatccgcacgcagcaacgccaagtggacggattaatgagcgcaatctaccaccgcctttccctacttgaccgccatacggatgaggcaggagcggcatttgtgcgcgaaaacggtaaaaccgttctcgtattcaatcagggcaacggcaggtttgagcggcattgcgcccaaggcagaaatcagccggaagcaggacggaaatattaccgcaacgcctgccataacggtgcggtcgtgtacaccgacgaagccatgcccgcacaggagctgctctatacagcctatcccgtcggcagcggcgcactgccttatttccacggcgagcgtccagaccccgtgccggaatatgaaatcacgggcaatcctgccagcattgatttttccgaggcggcaggcaaaattacgatgaaaagtttcaagctgtatcagggtaaaaacgaaatccgccccgtcagggttttaaccgccggcaacgaccccaacggcaggctgaccgcgtaccaattcgcgctttttccgctcaagcctttggaatacggcacgctttatacggcggtattcgactatgtccgcaacggacggcgagcgcaggcgaaatggcagtttagaacccgaaaacccgattacccttattttgaggtaaacggcggcgagacacttgcggttagaaaaggcgaaaaatatttcatccactggcgcggacgctggtgtttggaagcgtgtacccgttatacctaccggcagcgacccggcagccgcctgtccataggaaggcacgaggcgggcggcatcgtcttcagcgttgacggaatggcgggcagccgcatcacgcttgcaccggaaggagaaacggaacgaggcgtaaccctttatttacaggattgaatacatgacaggcagaacaggcggcaacggcagtacccaagcgcaacccgaacgcgtcatgctggtgggcgtaatgttggacaaagatggtacgggcagtagtgccgcccgtctgaacggttttcagacggcattggcggaagctgtcgagctggtcaaagcggcgggcggcgattccgtgcgcgtggagactgccaaacgcgaccgtccgcacaccgcgctgtttgtcggcacgggcaaggcggcggagctgtcagaagcagttgccgcagacggcatcgatttggtcgtattcaaccacgaactcacgcccacgcaggaacgcaaccttgaaaaagaactgaaatgccgcgtattggacagggtagggctgattctggcgattttcgctcgccgcgcccgcacgcaggaaggcaggctgcaagtcgagttggcgcaattgagccatttggcgggacgcttgatacgcggttacggccatctgcagagccagcgcggcggtatcggcatgaaaggccccggcgaaaccaaactggaaaccgaccgccgattgatcgcccatcggatcaatgccttgaaaaaacagcttgccaacctcaaaaaacagcgcgccctgcgccgcaagtcccgcgaatcgggcacaatcaaaacgtttgcgctggtcggctataccaatgtcggcaaatccagcctgttcaaccggctgaccaagtcgggcatatatgcgaaagaccagcttttcgccacactcgacacgacggcgcggcggctgtacatcagtcccgaatgcagcattatcctgaccgataccgtcggattcgtcagcgatctgccgcacaaactgatttccgccttttccgccacgctggaagaaaccgcgcaagccgatgtgctgctgcacgtcgtcgatgccgccgctccgaacagcggacagcagattgaagacgtggaaaacgtactgcaagaaatccatgccggcgatattccgtgcatcaaggtgtacaacaaaaccgacctgctgccgtctgaagaacaaaacacgggcatatggcgcgacgctgcgggaaaaattgccgccgtccgcatttccgttgctgaaaataccggtatagacgcactgcgcgaagccattgccgagtcttgtgccgccgcaccaaacacagacgaaaccgaaatgccatgaaaaaaacctgtttccactgcggtctggatgttcccgaacacctccacctgactgtccgttacgaaaacgaagaccgcgaaacctgctgcgccggctgtcaggcggtcgcacaaagcattattgacgcgggcttgggcagttattacaaacaacgcaccgccgacgcgcaaaaaaccgagctgccgccccaagaaatcctcgaccaaatccgcctgtacgacctgcccgaagtccagtccgactttgtggaaacccacggcggcacgcgcgaggcggttttaatgctcggcggcatcacctgcgccgcctgcgtctggctgatcgaacagcagcttttgcgtacagacggcatcgtccgcatcgacctcaattacagcacgcaccgctgccgcgtcgtctgggacgacggcaaaatccgcctttccgacattctgttgaaaatcaggcagataggctacaccgccgcaccctatgacgcgcaaaaaatcgaagccgccaaccaaaaagaacgcaaacaatacatcgtccgcctcgccgttgccgggctggggatgatgcagacgatgatgttcgcgctgccgacctacctttacggcggcgacatcgaacccgatttcctgcaaatcctccattggggcggctttttaatggtgctgcccgtcgtattctattgcgccgtcccgttttatcaaggcgcgctgcgcgacttgaaaaaccgccgcgtcggcatggatacgccgattaccgtcgccatcatcatgacctttatcgccggcgtttacagccttgcgacaaatgcggggcaggggatgtatttcgaatccatcgcgatgctgctgtttttcctgctgggcggacgctttatggaacacattgcccgccgtaaggcaggcgatgccgccgagaggctggtgaagctgattcctgcgttttgccatcatatgcccgattaccccgatacgcaggaaacctgcgaggcagctgtcgtcaaattgaaagcgggcgatatcgtgctggtcaaaccgggcgaaaccatccccgttgacggcacggtgctggaaggaagcagtgccgtcaacgaatctatgctgaccggcgagagcctgcccgtcgccaaaatgccgtctgaaaaagtaaccgccggcacactcaacacgcaaagccccctgattatacgcaccgaccgcaccggcggtggcacgcgactgtcgcacatcgtccgcctgctcgaccgcgccttagcgcaaaaaccgcgcactgccgagttggcggaacaatacgcctcgtctttcatattcggcgaactcctgcttgccgtccccgtcttcatcggctggacgctgtacgccgacgcgcacaccgcattgtggattaccgtcgccctgctggtcattacctgcccctgcgccttatcgcttgccacgccgaccgcgctggcagcttctaccggtacgctggcgcgcgaaggtattttaatcggcggaaagcaggcaatcgaaaccctcgcccaaaccaccgacatcatcttcgacaaaaccggcacgctgacccaaggcaaacccgccgtccgccgtatctcattgttgagaggcacagacgaagcctttgttctcgcggtggcgcaggctttagaacaacagtccgaacatccccttgcccgcgccatcctcaactgccgcatttcagacggcagcgtccccgacatcgctattaaacaacgcctcaaccgcatcggcgaaggcgtgggcgcgcaactgaccgtcaacggcgaaacacaggtttgggcattgggcagggcatcctatgtcgccgaaatttcaggtaaagaaccgcaaacagaaggcggcggcagcgcggtttacctcggcagtcaaagcggtttccaagccgtgttctacctgaccgaccccttgaaagacagcgcggcggaggcggtgcggcagttggcaggcaaaaacctgaccctgcacatcctcagcggcgaccgcgaaaccgccgttgccgaaaccgcacgcgccctgggtgtcgcgcactaccgcgcccaagccatgcccgaggacaaactggaatacgtcaaagccttgcaaaaagaagggaaaaaagtgctgatgataggcgacggcatcaacgacgcgcccgttttggcgcaggcagacgtatccgccgccgcagcgggcgggacggatattgcgagggacggcgcggacattgtgttattgaacgaagatttgcgtaccgtcgcccacctgctcgatcaggcgcggcgcacccgccatattatccggcaaaacctgatatgggcgggcgcgtacaatatcattgccgtaccgcttgccgttttgggctatgtccaaccgtggatagccgcactgggtatgagcttcagttcgctggcggttttgggcaacgccctgcgccttcacaaacgggggaaaatgcagtctgaaaaaatgccgtccgaacaatgacggacggcgttgctttagacgtatagttgatgaaaacaaaaataagacgatgaagaattgcaaacttaaagtatgtattgttaccgctcaaacacgttggcgttcaaaatttgagatcgaattgctaggtatttgattttattaaataagagattgtattaatgaggaaaaaaattaaaaagtggatttatgcgataaatggaataatgatgtcaatatggattattttttttccaaataccggttctgtgtatgacggtggcagaacaaccattttcaatgaaaaccatccttttcattttattttctgcataacatttcttattgggacaatttttcttatatatcatgaatataatgataactaatttttaacatccttattgttatatcatgatgaaatgacaataaggatggttttctgctttggctactgcagaacaccgtcgtcagtctcgcgtaggggggaatccatatgcttggtttttcttttattttcaaatgctaattaacggataggtctggattcccgcctgcgcgtgaatgacggaaatgtgcatttctaatttttacccactatatagtgaattaaatttaaaccggtacagtgttggctcgccttgccgtactatttgtactgtctgcggttcgccgccttgtcctgatttaaatttaattcactataaaaaccccgaatcctgattggcaggattcggggtttttgattgctggtgccgttcagacgggattttcaaacagcttattgatctacaaacgcacgctcaatcaggtaatcgccgcgtacgcctgttttcggagagacggtcagtccgaaatcgtccaaaactttgcaggtatctttcagcatcgcggggctgccgcacagcatggcgcggtcgtcttgcgggttgattttgggcaggccgatgtcttcaaacagtttgccgctcaccatcaggtcggttaggcgaccgtggtgttcgaattcttcgcgcgaaacaatcgggtagtaaatcagtttttctttaaccaagtcaccgaggtattcgtgttcgggcaattctttggtaaagcggtcgtagtacgccaaatcttttttgtagcgcacgccgtgtacgaggatgattttttcaaattgctcgtaaatttcggggtctttggtgatgctcaagaaaggagcgatgccggtaccggtgctcaacaagtaaaggtgtttgcccggattcaggtcgccggcaaccagggttccggtcggttttttgctgattaacacgtcgtcgccgactttgaggtgttgcaggcggctggtcagcgggccgtcttggactttaatgctgaaaaattcgaggtgttcttcccagttggcggaggcgacgctgtatgcacgcatcagcggcttgccgtccaccatcaatccgaccataacgaactgtccgttttcaaagcgcaacgattcgtcgcgggtgcaggtaaaggtaaaatatgcgtctgtccagtggtgtacggacaatactttttgggtattgaatgctgccatttgggtttcctgtcagtaaaagaaatggatagtgcttgttcgggaggtgcggcagagtggaaatgtctgcccgattcgggataaagccaaaattctaaacgaaacggatggttgcgacaatgcttgatgcgcgttggttatatgccgtctgaagggcttcagacggcatcgcggggcaggcggcggcttacggcggcatatcggcaagggaaatcagggaaatcgaggctgccagcctgagtgcgtcccgtccccagcgggggtgttccagcctgcgtatcgggaggatcggtttgacggtggcggcaatcagcttttgtatttcggcaggctgatctgacaatacgccgccccatttttccgcagccgcttccagcagtccgccgtttttcaatatcagcgcggtcgaatggatgtagcagagccaatcgcgggcttggcattgcgctatggtcaggacttcggaagggtcgtcttcaaaatccaaaaagctgatgttttttccgtccgacatcatatttcgcgcaaacgcctgactgaggaactgccgttttttatgcacgcgtgcaatggcttccaaaccggcaagccaagcgtccgactttccagcctcggcttcttggcggatttgcgcatcgagcgggatgccttccaaattgccgaacataagggcatttttcctgacggcgagcaattcgggaacggctatccccgccgagcgcaattcgtacaggcgttttgattcggttgcaatggcaggctcgccgccgaggctgggaaccggcttcaacacccccagtttcaaatatcgggcaaccataccgagcagcgcgtaacgccatcgtgcattgtgcctgcctgctttgcgtatccataccttggttccgtcggcaagcaggtggggggcgatggctgcctcctgttttgccgccaattcgtctagcagtatggaaaaacgggtttcctgcataggtaaggtcattttctttcaatcttaagttcggacggaatgcccctgtacggaatatcaggcaagggtttgttcgatgatgccttttaccgcatccgcactgttcggcacggtttgcacgcgctgcggcaggttttccaaaccttccagcgcggcagggcgcggaatggcggcatcgccgacggcttcgcgtatggtcgcatcgaatttcgccgccaacgcggtttccaaacaaaccaccatttcaccttcttcgcgcacttcgcgggcgacttttacgccgtcggcagtgtgcgggtcgatgagttcttggtcttgctcgtaaacctgcttgatggtggcgaggcggtcggcgtgggtggatttgccagaggtaaaaccgtatttgccaccgactttgtccaaggcaaatcgcaggtcaaagcctttgcctgcagccacttccgcccacagcgtattgatttccgcaggatcgcgatccatcaggtcgaacacgaaacgctcgaagttggacgctttggaaatgtccatagacgggctggaggttacataagtatgcgcgctgttgcgcgggcggtatgcaccggttttgaaaaactcgtccaacacatcgttttcattggtcgcgacaatcaggcggcggataggcaggcccatttgtttggcaatgtgtcccgcgcaaacattgccgaagttgccgctcggtacgcagaagctgacggtttcgtcattgcttgaagtggcgttgaaatagcctgcaaagtaataaaccacttgcgcgacgatgcgtccccagttgatcgagttgaccgtaccgatatggtatttttccttgaacgcggcatcgttctgcaccgccttcacaatatcctgacagtcgtcaaacattcccttcacggcgatattgtggatattctcgtcttgcaggctgtacatttgcgcgcgttggaacgcgctcattttaccgtcgggcgacaacataaatacgttcacgccctttttgccgcgcaaggcatattccgcagccgaacccgtatcgccgctggtcgcgcccaagatattgagttttttgccttctttgtttaaaacatattcaaacgcattgcccaaaaactgcattgccatatctttgaacgccagcgtcgggccgttggacaaggcttggattttgatgccgtctgaaagcgtgcggacgggggtgatttccttagtaccgaacgccgcttccgtgtaagtacggttcagaatgtcgcgcaaatcgtcctccggaatatccgtaacaaacaggcgcataatttcaaacgccaattcgggataagctaaaccgcgccatttgtccaaggtttcgcgcccgatttgcggataatgttccggcagcatcaggccgccgtcgggggcaagccccatcaataaaacttcgctgaacggtttgtgtgcggtttcgccgcgcgtgctgatgtatttcatgatttttctcgtctgtcgaaattgcaggaaaacggcttcagacggcatctgcctcatgccgtctgaagaaggttagcggtacaggtgtttgaagcaggcggaaaccgttttggcggtcagggcggcaagtgcctgattgcgcgtggacggagccagcatctgcatcacatcgttgccggtcatccgttcgggtgcttcttgggcgacgcaagcgcaaatcttgttttcccactccgcctgtttttcggcactcatcgccagcgcggtcaaacgccattcgctgcgtttgtccaattccgcacggcattggctcccaaccgccattttgacgatgctgccgcccatgcctgtgccaccgtctaagctgccgaatgtgttaccgcctccggcggcgcagccgccgagtaagattgccaccggcaaaatagacaaggttttattcatctcaattccttttcggttgaaaccccgccttttatggcgatagaatctgattagccgccccgttcgggataacgcgaagggcggcgttttatgcgccgttccgagtgttggaacaaaccgttttgaatatccggttgaagcccggcaacattatacttcaatcgggaaaataaaaaatcccgccgccgtcattttgcctgtttgcaaaaatgccgtctgaaagcggttcagacggcatttccgatttcagcctagcccaaagatttgaagtgttccaaaaacggcgggataccgggcagcatcccgaccgcacccatcgccacacacaagatcaagaaacctactgcgggtatcaacacgcgtccggcgaaacctaattgcgcactgcgctctttgcagccgattaagcccaaattatccaacagcatcgtcaacgcccagccgaaaaccggattgaccaaggcggaagagaacaccacgatggcggcggattgggtggttttgcctttgcgcgtcatttccatgcccgcttccaaaagcggtaagtatacgcctacgaccaaggctacgctcaataccggctgccaaatcgccaagtccatcggatagccccataacccggcgataatacataaaaccgccgttaaaaccgcaccgcccggaatggggcgtttggcaatcgatgccggtacgatataagttccccaagaagaggtaaaatttgcaccccctaaaatagaacccactgcttgacggacagaacaacttgtcatggtgtcgtctatattcatcaataccttatcggttttttccggatagctgattttttggaacacttgatgtcctaaaaaatcgggcgaccacattgcaacagccaataccgcaaatggaaagacaaccaaaaaactttctgccgtcggcaaccccagatgccagccgctgttttcaccccaccaataagcaggactcattggaggcaggccgggggcggtgtgaaactcaaacggcgcacccaatgcaaatgccaccacaccggcaatcaagcatcccaaaggcacggctaaccagcgttttttccaatgctccaacaaagcgtacatcacaatcgttacaataatgacggtaaaagcgatgtagggcatattaaaaccgcctgcccacgaaaacaatttttttacctgccccgtcgtgccgataaagcccaaatagagtaataatccgccgcatacgccgttgcttgtcagcttcgccataatactgccgccgcgaaataaagccatcagcagacctaaaaccgcaatcgaaatgccgaacgccaaaggatgcccgcctgccgacacaacgatgggaatcatcggaatcagcggcccgtgcgtaccgggcaggttggcgccgggcagaaaaaagcccgataccaataagataaacgcggcggcgattaaaagctcatagcgcacattttccagtacaaagctgtcaggcagccccaaaggtgcggcaaacgccgccgccaccgcccccaccatcaccacttttccaatcgttcccgccatcgcaggaatcaaatcctcccactcgaagcggtaatcgcgaaagggcaggttgggccgccagcgttttggttgcataatctgcaattcatgttccaaatattcgtcccgcgtcgcaaattccgaagctggacggtgcaaatcccgataagtcccattatgtttttccataaccttcctccttatatatcgcgcctcgtaaaaggggcgcatgacttttctttttgatacgggctgcgttcggaagccgtaaccccatttaaagcccaaacaggcaataaaaccaatctttttttttgataaccatcatccggaaaactgatacaatttacaaaccacttgattaaaaagttaattttcagcaacaatccacctaaaagatttcgattgcacaaatatagaaaacatccgcacaaggagggatatatggatgccgtacaattaaaatcatttgtcgccgtcgcgcacgagggcaaccttacccaagccgccaaacgacttttcctttcccagcctgccgtttctgcccaaattaaagcccttgaagaatatgtcggcacgccgctgttcaggcgcacggggaaaggcatggtattgacgcgggcgggcgaaatactgttgcccgaagcggaatccctgctgcaatacaaacacaagctggagcattttgccaaaacgctggcaggcgattattcggaagagaccagtttgggcattatccaccccatcgattcggcaaaactcgtcgcgctgacggacaatatcggtcaaacagcccccaaaacgcgcctgcacatccaatacggaatgagcggcgaaatcctctcgcgcatccaacacaaaaccctgcacggcggctttatactcggcaacgccgcccaacgcggcatccgcagcgtattcctgcaaaacctgacctacgcgctgatttgcccgcaaagccaatatccccatctgacccgctcccttccgcagagcctgcaagaatgcgtatggatagaaatgtcgggcgtgtccggaagtaggaagcacctgcaccagttttggcgcagcaaccggctctcacccaaaaaacagatcttgtgcgactacccccaaaccattatcgatttggttgcaggcggtataggtgtggcaatggtgccgggaaacaaagccgaagcggcggcaaaagaaggcgcgggcgtggctattatcgaatcgtgccgccacagtatgccgctcaatttcatttatgcggaagaatacgaggataatccccacgtctcactcctgctcgagtgcattgaaaaagtatggggagtgcaggcggtgcagccgcccgttgtctcggacaactgaaataaatcctgctttgctgattgttttaaaatagaaatttgaattttatcacgctgaaaacactgaaaacgccatccgcattctctcaaatacggcttaaaatgccctttggaaatgccgttatagtggattaacaaaaatcaggacaaggcgacgaagccgcagacagtacaaatagtacggaaccgattcacttggtgcttcagcaccttagagaatcgttctctttgagctaaggcgaggcaacgccgtactggtttttgttaatccactataaactgacgcaaataccgttttgcacaattccaaaagttttcaattccgttaatgcgattttgccgtttggcgaaatgcgtactgttccagtcgtggattgaacccccaccctgtatagttctttcgaagcattggggtattgttttttcaaagcatcttggattcggatttcaagtgcaacactagtgtattagtggttggaacagattcaagaataaaacacttggcgtttcgtagccaagtgtttttcttggtcggtggttcaactcatcttgaaccctgcgtatctcccgatcactgatgttacggaaatcggtttgtttggggaagtattgccggatgagtccgttggtgttctcattcagccctttctcccaagaatggtaagggcgacaaaaataagtctccgctttcaatgctttggttattttggtgtgttggtagaactctttgccgttatccatggtaatggtgtgcaccctgtctttatgtgcctttaatgccctaacagctgcccgggcagtgtcttcggctttgaggctatccaatttgcagatgatggtgtagcgggtaacgcgttcgaccaaggtcaataatgcgcttttctgtcctttgccgacaatggtgtcggcttcccaatcgccgatacgggatttctggtcgacgatagcgggtcggttttctatgccgacacggttgggtactttgcctctggtccatgtgctgccgtagcgtttgcggtagggtttgctgcatattctgagatgttgccacaacgtgctgccgttgcttttgtcttggcgaaggtagcggtaaatggtgctgtggtggagcgtgatctggtggtgtttgcacaggtaggcgcatacttgttcgggactgagtttgcggcggataagggtgtcgatgtgctgaatcagctgcgaatcgagcttatagggttgtcgcttacgctgtttgatagtctggctttgccgctgggctttttcggcgctgtattgctgcccttgggtgcggtgccgtctgatttcgcggctgatggtgcttttgtggcggttcagctgtttggcgatttcggtaacggtgcagtggcgggacaggtattggatgtggtatcgttcgccttgggtcagttgcgtgtagctcatggcaatctttcttgcaggaaaggccgtatgctaccgcatactggcctttttctgttagggaaagttgcacttcaaatgcgaatccgccgtcgtttgaacatttttttcttcctgtttgatttcagacggcattgccgttccgtttggtttccagcagctcccagcgttccagcttttccaaaagcagcatttcgatttcttcggcgcggttttgcaatgcacctgctttttcgtaatctttgaaaatttcaggataggaaagttgggtattgatttcagcctgctcggcttccaaagcggcgatttcgtcgggcagggcatcgagttcgcgctgctctttgtaggacagtttgaccgtgcggttggctttgggtttttctttggcgggttcggcatcggatgctttgggtgcggatgccgtctgaattttatcttcccgcgattttgcgtcgatatagtcctgatagccgccgatgtattctttcagacggccttgtccttcgaaaacaatgctttgggtaattacgttatcaaggaacatacggtcgtgcgagacaaggaatactgtgccttgataatcgcgcaacaggtcttcgagcagctcttgggtgtcgatgtctaagtcgttggtcggttcgtccaagaccaggatattggcaggacgggtaaagagttttgccagcaaaaggcggttgcgttctccgccggagagcgatgaaacagggctttgcgcacgggctggatggaacaggaaatcttccaaatagctcatgacgtgttttttcttaccgccgacttcaacgtaatcgtttccctgtccgagggtgtaaaacacggtgtcgttttcattcaacgcgctgcggaactggtcgaaataggcgacttcctgcttactgccgatacggattctgccgtaggtcggctgcaattcgcccaaaatcagcttaaggaaggtggttttgccgatgccgttggggccgattaggccgattttgtcgccgcgctgcaagatagcggagaatttgtccataatgactttgccgccataggcaaacgaagcgtgttccaattcggcgatgattttgccacttttctcaccgctatcgagcttgaagttgacttgtccctgtacgttgcggcgttctgcacgctggcggcgcagctcttccaaacggcgcacgcggccttcgttgcgggtacggcgcgcttcgatgcctttgcgtatccatgcttcttcctgtgcgtggaatttgtcaaagaggcggttgtgttccgcttcgactgccaactcttgcgcttttttctcgctgtatttagagaacgagccgggataggaacgcaaaataccgcgatcgagttcgacaatccgcgtggcgatattgtccaaaaaacggcggtcgtgggtaatcacaaccaagctgccttcaaacgctttgagcagattttccagccaaataatcgcgtcgatatccaaatggttggtcggctcgtccagcagcaatacgtcgggcttttgcacccaagcctgagccaaggcgacgcgctttttctgaccgccggaaaggttgccgattttttcattttccggcaaaccgagttcccccaaagtctgcttgactgccgcatccagtttccagccgtccttcgcttcgatttcaagttgcaattcgttgagttctttcaacaaagcctcactcgaaccattttccaactcatggctgacatgatgataacggcgcaataaatcacgaatttcgcccaaaccttcggcaacggtatcaaatacggttgcgtccttatcaaaaaaggattcctgcggtacataaacgattttgaggttgttttgaacaataatctgcccgtcgtcgagcttttgcaaaccggcgaggatttttaaaaacgaagacttgcctgcgccgttgcgtccgattaagccgactttttcgccgctgtcgagttgaaaagaagttttgtcgagcaaggcaacgtggccgatggcaaaagaagcgttttctacagataatatattcatgatacaaattctcaacagttaccgtttggattttaccgcaagtttggcgcgggcaatttcaaccgcacccggcaggacggaaacaataatgatgccgcccatcaccaagcccagattgttttttacgacggggaagttggcaaagaaatagcccgcgtaagaaaacaggataacccacaacaagccaccgatgatgttgtagcggataaatttggcatagtgcattttccccataccggcgacgaagggggcgaaggtgcggacgatgggcataaaacgggcaatgatgatggttttgccgccgtgtttttcgtaaaaacggtgggttttatcgagatattcacgtcggaagattttagaatcggggttggcgaacagcctgccgccgaaatatttgccgacggtaaaattgagcgcgtcgccgagtatggcggcaaggcttaataatgcaaccatcaaatgaatatccataccgcccagcgcggcaatcccgccggcggcaaacagcagcgaatcgccgggcagtaagggcgtaacaatcaggccggtttcgcaaaaaacaatcaaaaacagaatcgcataaatccacacaccgtattgcgccgacagcgcgagcaggtgttggtcgatatggaggatgaagtcgatggcggaggcaagcacggcgcgttcctaaaaaaacaaaccgcgtattttaaccgattggaaaaatgccgtctgaaaagtttcagacggcatcggctattcaaattcatttcacgtaaaaaccgcaaaccaaaatagtttgcggtttggcatttaaagtgacaatgatgatttcaaatcatcagaattttatgccgacgcgcaagccgtattcacgaatactggttttcgggatggtgagcgatacgtcgccactcttggttgttacactaaactcgccggattctttgtaagtgcgttgtttgtagaacggccccgcctcgatgctggcggattcgcccagttttttaccaatatttgcacccaatccaaagccccagccgttggttttttgattgatgtcttttttgagattggtaacgccggtgtttaatttatagcgggaattgaggtcaaatttcacttcagaccaagggttgatataccagccgttacccagttgggaaagcaaatccgcgtgaactttggctaaccacgactgacggctgctgtgaagcgtatgcttggtggttttaatgctgtcttttgaagattcaaaacccaagccggcacccacacggaaatttaaagaatcacttaacgtttgggtgtaggtgtagcctgtgtaaagatcgatacggttttcaggaacgccggtgggcagttttacatttttagtcttacccagcttgttctcatctgtttccaaattaataatattttttttgctgcgcccgaaaccggcttccaagcggatgccttggttggcatcaaaaggaatatcagcacgcacgctgatgtgtttggcagctttgtgtttttctttcaggaaagcacgagttgaagaaatggaagagaggtcggtgtggacggtaaactcattagcggtttgaagctcttgtgcagcggcggcagtaccggtcagggcaatcatggcacatgtaaaaactgtttttttcatagttaaaacctctaaaatttggattgtagtcggatatggtaacataacgtaaataatcgttacgcttacaattatattcttaagctttcggggggggggggattttacatatattaataaaaattaacaaatagttatttgtttacaacgaattgttattctcacttggttttctgttttttatgggaatgacgaaattttagtttgtgtgtatttatcggaaaaacagaaacccgccgccgtcattcccgcgcaggcgggaatctagaacccaacgcgacaaaaatttatccgaagcgacaacaatcttttcatcgtcattcccgcgcaggcgggaatctagaacgtaaaatctaaagaaaccgttttacccgataagtttccgtgccgacaaacctagattcccgcctgcgcgggaatgacgggattttaggtttctgatttcggttttctgttttaagggaatgacgagacttgagatggcggcatttatcgggagcaactgaaaccaccctgccgtcattcccgcgaaagcgggaatctaggttcgtccggtttcggttatttccgatagattcctgccgcgttgggggtctggattcccgcctgcgcgggaatgacgggactttaggtttctgtttttgtttgagacctttgcaaaattcctttccctcccgacagccgaaacccaaacacaggttttcggctgttttcgccccaaataccgcctaattttacccaaatacccccttaatcctccccggatacccgataatcaggcatccgggctgccttttaggcggcagcgggcgcacttaacctgttggccgctttcaacaggttcaaacacatcgccttcaggtggctttgcgcactcactttaatcagtccgaaataggctgcccgcgcatagcggaatttacggtgcagcgtaccgaagctctgttcgaccacatatagtggattaaatttaaaccagtacggcgttgcctcgccttgccgtactatttgtactgtctgcggcttcgtcgccttgtcctgatttaaatttaatccactataacgggtcttcgataaatatcggttacgtttggtttgcgtttccgtcagcggacggttgcggcaggctttgcgcataatgccgtccaacaactgatgttcttccagatgttgccggttttccgcactgtcatagcctttgtcggcatagacggtcgtacctttgggcagtccttccaacaaaggcggcaggtgtttgcactcatgggcattggcgggggtaatgtgcagtttctcgatatagccttccgcatcggtacgggtatgttgtttgtaaccgagtttgtagaggccgtttttcttgatccaacgggcatcgctgtccttactcggtgtggtttggccgttgatttgtccttcttcatcgacttctatgacctgacgctgtgtgctgccggcggtctgaataatggtggcatcaatgacggcggcggatgctttctctacttttaagcctttttcggtcagttggcggttgatcagttccaataattcggacagggtgttgtcttgcgccaaccagttgcggtagcggcataaggtgctgtaatcgggaatgctcagttcgtcaaaacggcaaaacaggttgaagtcgatgcgggtgatgaggctgtgttcgagttcgggatcggagaggctgtgccattgtccgagcaggacggctttgaacatggacaacaggggataggcgggacggccgcggtaatctctgaggtaacgggtttttgacggttcaggtatggttcgatcggctgccaatcaatcacccggtccaacttcaatagcgggaaacggtcgatgtgtttggcaattatggcttgtgcggtttgccggaagaaggtgctcatgagaaatcccctaaatgtcttggtgggaatttaggggattttggggatttttgcaaaggtttccgcctgaaacattatgagatttcaggcggcattggattgcttggcggaatatttttaaaaaggcttacgcgccgtaaacggggtatttattgcacaaagcagttacttgtttgcggactttggcgaggttggcttcgtcttcggggttagacaatacgtcggcaaccaagttcgccaatacgcgcgcgtcggcttcgttaaaaccgcgtgtggtcatggcagcggagccgatgcggatgccggaggtaacgaagggtttttccggatcgttcggaatggcgtttttgttgacggtgatgtgcgctttgcccaaagcggcttcggcggctttgccggtaattttcatcggttgcaggtcaacgaggaaaacgtggctttcggtgcggccggaaacgatgcgcaaaccgcgtttaaccaactcttccgccatggcggctgcattgattttcacttgttttgcgtattgtttgaactcgggttgcaatgcttctttaaacgccacggctttggcggcgataacgtgcatcagcggaccgccttgcaggcttgggaagatggaagagttcaacgctttttcgtgggtattgtcgcggcacaaaattacgccgccgcgaggaccgcgcagggttttgtgggtggtggtggtcacgaagtcgcagaacggcaccgggttgggatattcgccgccggcaaccagaccggcatagtgcgccatatcgacaaagaggtatgcgccgactttatcggcgatttcgcggaattttgcccagtcgatttgtaacgcgtaggcagacgcacccgccacaatcattttgggtttgtgttcgagcgcgaggcgttcgacttcggcataatcgagcacttcgttttcatccaaaccataagtaacggcgttgtagagtttgcctgagatattaacgctcgcgccgtgggtcaggtggccgccgtgcgctagagacatacccaaaatggtgtcgcctggttttaaaacggaagcgtacacggcttggttggcttgcgagccggagtgcggttggacgttggcataggctgcgccaaacagttcttttacgcggtcaatcgccaattgttcgacaatatcgacgtattcgcagccgccgtagtagcgtttgccggggtagccttcggcgtatttgttggtcagctgggaaccttgcgcgtccattacggcgcagctgacgtagttttcggaagcaatcagctcgacgtggtcttgctggcgttggtcttcttgggcaatggctgctgccaaatcggggtcgtattgtgcgagggtaacgctttttgaaaacatgttctcggctcctttgtgtaatcagggtatcatgagtgttttttgtataaaaaaatatttcaaaacctaaggcagatagcccataatgcgtaaattttctttggcattatcaggtaatttatttaacatgctggtttttagcgtctcattacctttatttagtacaagactaatcaaaagcaatacattaaatggtaaattttcggcagtttgtgcaaaatcaatcaaataaccagcaccaaccacatctttatcagccataacccgctgatacaccacttgctaagacaactctcctgccccaccatgtcttaaaatcagatgaatggcttgtaatgctgtgtttggtgtctcacaaattgccaagatctgctcagaagcttgcttgatggcttgtatttttgtttgattactcacaatttccccctattttaataattaacttaaatgcggtcaaattcacaaaatacaagctttacctctaatcacccatcactcgaccttctcggcgtggatcggcaccaccaaccagcctgcttggctcgataataatggcttgaacacctgaatttagctcacgcacatcagtcttatagcccaaatcatttaatgcttgttgccactggacggcggttgtacccgtttctagttcatagctaccaaagcgatttaataaattgggtgcactgatggcattttggatatccatattccagtcactatgtgccacaatcgtcttagcgacatagccaatgatacggctaccacctggggagccgattgccatataaggcttgcctgctttaaatacgatggttggtgccattgaggagcgtggtctcttgccgggctcgacacgattggcgacctgtttgccctgctttattggctcaaaactaaagtctgtcagctcattattcagcaggtagccatttgccatcaaagttgagccaaacgcattttcaatggaagtcgtcattgatagcacattgcccgccttatccacaattgatatatgactggtagaaggtaactcaatcgcttgtgaggacacccactcatgaataaaatcgcctgcagatacgctaggcaatgccttatccgactgctcaagcagctggctgcgatgttttaggtagtctttagaaatcaactggcgaatgggtactggtacaaaatcagggtcgcccaaatatacatcacgatccgcaaacgcaagcctagaagcgtcgcccaagagacgtaaaccttcagcatcataccccacctgattgggtgaaaattcatttaaaatccccaaaatctgacccacagcaatcccacctgagcttggtgcacccataccgcatacttcataaatacgataagtcacacaaacaggcgggcgttccaccacttgataatcagataaatcttgtaaggataattgaccggggttatccttagcattttggacaactgaaacgatattttgggcatatttaccagtatgcagagcttttgcaccttgagctgctaacgcctgaacactgtcagcaaattctaaatttttcagcaagctgcctgcttgtagcggcacaccattcggcaaaaaataagcggctgtttttggatagcgtgccaaatgctgctgattttgctcaaccgagatggcaagccttggcgacacctcaaagccttgttttgccaagcggatcggtgtatcaaataattttccccaaggcaatacaccgtatcgctgatgtattgtctccatcagtttagggatagcaggcgtacccaccgagcgaccaccgaccaccgcttccataaatttcaatggttgaccatctttatccaaaaataattccggcgtcgcacgcatcggtgccgtctcacgcccatcaaatgtggtcaatgttttggcggtattatcccaatacaacacaaatgcaccaccgcccaagcctgacgactgtggctctaccaagcttagtgtcgtctgcaccgccaccatcgcatctgcagcgctaccgccttgctttaagatatcatagccagcttgtgttgctaatggattggctgacgctaccataaaatcacttgcaatcacctgcttttgttcggtcagtcccgttgcatgttcaggcgtgtgagcgtctgcacctgtgatgacagcagaatgagtattaaccttaccttgattggcatggatgacttgacatccagagattgtcatagacattatcaatgcagtcaataaatatgttttagccacaagcactccttcgcctgagtttgattgatgattcatacaaggcatgctgattattgtatttaatatggctaaataattcaatccaaactatcaatcttgaccatcaaaaaaagaccgctaatgtcatcagcagtcttttttgatatttattttaagatattaagtaatcagacctttgggctatgctcttcaatgagtggttttagctcacctgattggtacatttgtaggataatatcactaccaccgattaactcaccattaacccaaagctgtggaaaggttggccgactggcgatgagtggtagagtactgcgaatttctgggttttctaggatattaacaaaagcaaagggtctgccaattgggtcagcacctctactgcacgcgctgaaaatccacattggggaaactggggcgtgcctttcatatatagtggattaacaaaaaccagtacggcgttgcctcgccttagctcaaagagaacgattctctaaggtgctgaagcaccaagtgaatcggttccgtactatttgtactgtctgcggcttcgtcgccttgtcctgatttttgttaatccactatacagtaggaaaggctgaaaatttatgcgtaaagcgtgatattgtcaacgtttttatcaaccggacggcggtgttaaaagaaaattttgccgtatccgataaaacactggataaaaatattatctttgttataattaatgtaaagattcaatttgactttttaaccgtaaaccaagagaggaaagcgatatgttcccagaataccgtgatttgatttccaaattgaaacaggaaaattcccgcttcgcccgtctgttcgacgaacacaacgagctggacgataaaattaccggtctggtcaacaatccggttaccagcggtgcggaaaccatcgatgagctgaaaaaagccaaattgaaactgaaagacgagttgtacgccatcctgcaaaaagcagcgggaaaataattcgggtttgagtttttgaaatgccgtctgaaatgtgttcagacggcatttttgtcatttgaccggaaggcttgtgctgtttgaaataacggcggcggtatcggattgccgccgccgtgtacttgtgtgaacggctgtctgtctattttgcgtgcaggcggtcgagataggcgacttcttcgctgctgcccatgaagacggcgacgcgttggtgcaggttttcgggctgtatgtcgagcatggcttgatatgcgttgcttgccgatgcgcccgcctgttcgagtatcaggctcatagggttggcttcgtacatcaggcgcagtttgccgggtttagcggggtcgcgtttgtcttgcggatacatgaacacgccgccgcgcatcaggatgcggtggatttcggcaaccatactggctacccagcgcatattgtagtttttgccgcgcgtaccggtttcgcccgccaagagctcgtcgatgtattgttggacggggggcagccagtggcggcggttggacatattgatggcaaattctttggtactttcgggtactttcgggttttctttggtcagcacaaattcgttttcggcattgagcgtgaacatatatacgccatgtccgaatgtgaatacgagctgggtttgaggcccgtaaagaacgtaaccagcggcaagctgctgtctgcccgtttgaaggaatgattcggttgccaatgcgccttcgggtttttcaaggatggagaaaatcgtaccgacggaaatgttgacatcaatattggacgatccgtctaaagggtcgaataggacgagatagcgtccgttttcaccggcatttacgaaagtgtcttcttcctcgctcgccagcccggcaacggcagaattggctttgagtgtgtcaatcatgatgttgttggcgataacatccagttttttttggtcttcgccctgaatattgcccgtgcccgccatacccaatacgccggccagtgcgccgaggcggactttggcgttgatttcggtgcaggcggaaacaacggacagtaaaacgccgccgagtgcttcgggcagctggttttgttgcaggtgttcggggaggaatcgggtcagtgtgtccatagtttgctcgtttcggaaaggtttgtgccgtctgaaaggcggcaggttattgtggcgtattcctttggtgcgttttgcaggatagtctaggggattgtagtgtaaaaaaacggcatggggcaagtcggaacgcggcaggcggatgaggggatatttattcttaaaagtgccgactgccggtatatcgtccggttttgtttatttgacgggagatgttgtctgaagggtttcagacggcatcggggtcagcggattttgctgtccaaaaggtagcgcgagccttcgtcttgcgccagcagccgcgtcagggcggggaggtttgccgccaattgttccgccaacagatagggcggattgatgacgaacattccgctgccgtgcataccgaaaccgtcggctttcggcgcgtggacgtgaagttcggcgtgaaggtagttgtcgggcaggagttttttcaattcttcgggcagcttgcggctttcttcgcggctgaggcagggataccaaatgagataacagccggactcaaaccgttttaaagcggctttcagcgtttccgttacacgccggtagtcctgtttttcctcatagggcgggtcgatgaggacggtggcgcggcgcggcgggggcggcagcagggaaatcagccctttgtaaccgtcttcgcgtaatacttgtccgcgtttgcccaatcctgcttcgcccatattgttttgcagatggacaaagtcggtggggtgcagctcaaacaggcgtaatttgtcgccgacgcgggtcagcgattgcgccagccacggagaaccgcagtaaagtttgggcgagggcaggattttttgtatgtgcgcggcaaagtcagagagttcggcaggcaggttttgcgcctgtcggagcagggcgatgccttgtcggtattcgccgactttctgcgcctcgctgccttcgagattgtacacacccgcgccgccgtgcgtgtcgatgtaccagtagggcttgtctttgcggttgaaatattgcagcactaaaaacaaggtgaaatgtttgagcatatcggcgtggttgccggcgtggaatgcgtgtctgtaactgagcatagtcggtaaaacggcgggatattcggatgccgtctgaagcggggttcagacggcataaacagggatggatgggaaatcagcggctgccgccgattttgctttctctgccttcgagcagcttgacgatattacttttgtggcggaacaacaccagcaaagcaatggcgacggtcgcccaaacccacgagacgtgcggcataaagaaggatgcggcgaccggtgcggcgattgtggcggttaatgcggcaagggaggacaccttgaagccgaatgccataacaagccaaatcaacgcgcagaccaaggcagttgcgggagagagtgccagaagcacgcccaatgccgttgccacgcctttgccgcctttaaatccgaaaaacaccggccacatatgcccgaccagcgcggcgagtgcgacggccgcgattgcgctgtcggataaaccgagcggttcttgaagcacgcgtgcaagcaaaacggcaactaaacctttggcggcatcgcccaagagcgtcagcgcggccgccttttttttgccgctgcgtaaaacattggttgcccccggattgcccgatccgtaggtgcgcgggtcgtccatgccgtaatacttggacacgatgacggcgaaagaaagtgagccgatcagataggaaacagcaacagccggtatgttgaacatttgcggtactttacttagaatggtgcggttattttagcaaaaaacggggcggattatggataaaatctttttgcacggcatgaaggcagatacgcttatcggcgtgtacggctgggaacgcgaacggttgcagaccctgattgtcgatttggacatcggtgttcccgagaaagcgggttcggacgacgatattgccaatacggtgcattatgccgaggtatgcgaaacgctgcgccgacatctgaaagaacaggatttcctgcttttggaagcgttggcggaatatattgccgatttggttttgggatatttcggcgcggtgtgggtgcgcgtgaaaatcgtcaagccgggtattttggaaggcgtgcgcgaggttggcgtggaaatcgagcgcggcaagcgtgaagattgaacggcagaataggaaacggaaaggagatatgaagtggatttgagggaagtaaaattaggcggcgaaaccatttacgagggcggtttcgtcagtatcagcagggataaggtcaggttgcccaacggcaatgaagggcagcgtatcgtcatccgccatccgggtgcggcatgcgtgttggcggttacggacgaagggaaagtggttttggtgcggcagtggcgttatgcggcaaatcaggcgacattggaacttcctgcgggcaagctggatgtggcgggcgaggatatggcagcgtgtgcgctgcgagaattggcggaggaaacaccttataccgccgacagcgtacgcctgctttacagtttttatacggcggtcggtttttgcaacgaaaaaatgtatctgttcgaagcggaaggcgtgcgtttgggcagtacgcttgccaatgacgaagacgagattacggaaaccgtattgatgtcgaaagaagaagtccgtcaggcattggcaaacgatgaaattaaagacggcaagacattaatcggtttgcaatactggttgatgaaggattgacaggatgttggacttgcccgccggattggatcggcgggcggtttgtttggcggatgggatatgccttttcggcttgtatctgggcgcgtcctttaaagtcattcgtgctttagtaataagagagaaaaggggatgataattacctaaaagaacgtgataatttttaaaatggttaataatgaatatctttgttactaatttttgttattggtttattagtttattggctatttcttatataccatctattaatgcatggcatgatgaattaatagatgatattaattttggcaaaagggttatgatggttactttttttgcatttttaggcacggtaatagagcgtttttttaagaaaaagccttggtggttttatcctgccaaggctttttctttgttacagacctaaaagctcaatttgaatttgagaacggtaattggcacagccagtatttaaacaagcgaagctaatttatagattatgtcaaaacaaagggaggcaatttgttgcggttatttgactgccgcccctatcttcagcccgagccaggtcagcagcagcgaacctgccgtgtgcaggaaaatattggcaagtgctgaagcgggacggttcaattggagcagggttacggtttccagcgaaaatccggaaagcgtggtcaggctgccgagaaaaccggtaatcagcagcagcttccattgcgggtggttgacggtttcggcaaagattccgataagaaaagcgcctatccagttggcaaacaggttgcctgtggcgggaggtattgatgcgggaacggcgaggttgagcagccaacgcgccgttgcaccgagtgccgcaccgatggaaagggggatgatgttggaaagcatggttttgcctgtctatgccgtctgaaggctaccgccatatgccgcggtcggacttaagatagcggttgtcgtcgaaagtgttaatccaatggggcttcagtgcaacaaatatggcagttgaaatgccgctgaggaaggcttccgcccacgccagcagaataaagacgggcagggcggtcgtccacaatatttcggacggaaaagcgtttgcggcatccaaaataccggtcagcaccagcccggtcagcagaatgccggcggcggaagcgagaaagccgttgacgaaaataaagatgaaaatattgggcggcaggcggttgaccagcatacgcgacaggcggttgacggtcagcgcgggcagtatcagcaccaaagcgttcggcggatatgcgccgacagaaccggcaaacagcaggcagtagggcagcatcagcagcgcggcaagccaaagggcggcggaagtgcccatcatcagtgcaaccaaattgacggcgagcaggtggtagttcatctgggcaagctgtccgccgccggcagaggcgttcagacaccatgctgcggaaaaaattacggtacacaggggaagggcggaacggtagcgggcaagcgagcggaatgccgacggcgcggaagctgccagtatcaggataaggacaatccacgaaaccgacagtaccatatctgaaaaccagactgtttggaaaatcatggcaatgccgcaaagattaagggaagggacggctattatactgtcggcgggggcaaaccgaaagccgaatcggtttcggcagaattgccggccggttgttttttttgggatggaaacacgttaaaataaacccgtttaatcgtttgtcttgcgggaaacggcatatgttttggatagttttgatcgttattttgttgcttgcgcttgccggcttgttttttgtccgcgcacaatccgaacgcgagtggatgcgcgaggtttctgcgtggcaggaaaagaaaggggaaaaacaggcggagctgcctgaaatcaaagacggtatgcccgattttcccgaacttgccctgatgcttttccatgccgtcaaaacggcagtgtattggctgtttgtcggtgtcgtccgtttctgccgaaactatctggcgcacgaatccgaaccggacaggcccgttccgcctgcttctgcaaaccgtgcggatgttccgaccgcatccgacggatattcagacagtggaaacgggacggaagaagcggaaacggaagaagcagaagctgcggaggaagaggctgccgatacggaagacattgcaactgccgtaatcgacaaccgccgcatcccattcgaccggagtattgctgaagggttgatgccgtctgaaagcgaaatttcgcccgtccgtccggtttttaaagaaatcactttggaagaagcaacgcgtgctttaaacagcgcggctttaagggaaacgaaaaaacgctatatcgatgcatttgagaaaaacgaaacagcggtccccaaagtccgcgtgtccgataccccgatggaagggctgcagattatcggtttggacgaccctgtgcttcaacgcacgtattcccatatgttcgatgcggacaaagaagcgttttccgagtctgcggattacggatttgagccgtattttgagaagcagcatccgtctgccttttctgcagtcaaagccgaaaatgcacggaatgcgccgttccaccgtcatgcagggcaggggaaagggcaggcggaggcaaaatccccggatgtttcccaagggcagtccgtttcagacggcacggccgtccgcgatgcccgccgccgcgtttccgtcaatttgaaagaaccgaacaaggcaacggtttctgcggaggcgcgaatttctcgcctgattccggaaagtcagacggttgtcgggaaacgggatgtcgaaatgccgtctgaaaccgaaaatgttttcacggaaaccgtttcgtctgtgggatacggcggtccggtttatgatgaaactgccgatatccatattgaagaacctgccgcgcccgatgcttgggtggtcgaaccacccgaagtgccgaaagttcccatgaccgcaatcgatattcagccgccgcctcccgtatcggaaatctacaaccgtacctatgaaccgccgtcaggattcgagcaggtgcaacgcagccgcattgccgagaccgaccatcttgccgatgatgttttgaatggaggttggcaggaggaaaccgccgctattgcggatgacggcagtgaaggtgcggcagagcggtcaagcgggcaatatctgtcggaaaccgaagcgttcgggcatgacagtcaggcggtttgtccgtttgaaaatgtgccgtctgaacgcccgtcctgccgggtatcggatacggaagcggatgaaggggcgttcccatctgaagaaaccggtgcggtatccgaacacctgccgacaaccgacctgcttctgcctccgctgttcaatcccgaggcgacgcaaaccgaagaagaactgttggaaaacagcatcaccatcgaagaaaaattggcggagttcaaagtcaaggtcaaggttgtcgattcttattccggccccgtaattacgcgttatgaaatcgaacccgatgtcggcgtgcgcggcaattccgttctgaatctggaaaaagatttggcgcgttcgctcggcgtggcttccatccgcgttgtcgaaaccatccccggcaaaacctgcatgggtttggaacttccgaacccgaaacgccaaatgatacgcctgagcgaaatcttcaattcgcccgagtttgccgaatccaaatccaagctgacgctcgcgctcggtcaggacatcaccggacagcccgtcgtaaccgacttgggaaaagcaccgcatttgttggttgccggcacgaccggttcgggcaaatcggtgggtgtcaacgcgatgattctgtctatgcttttcaaagccgcgccggaagacgtgcgtatgattatgatcgatccgaaaatgctggaattgagcatttacgaaggcatcccgcacctgctcgcccctgtcgttaccgatatgaagctggcggcaaacgcgctgaactggtgtgttaacgaaatggaaaaacgctaccgcctgatgagctttatgggcgtgcgtaatcttgcgggcttcaatcaaaaaatcgccgaagccgcagcaaggggagaaaaaatcggcaatccgttcagcctcacgcccgacgatcccgaacctttggaaaaactgccgtttatcgtggtcgtggtcgatgagtttgccgacctgatgatgacggcaggcaagaaaatcgaagaactgattgcccgcctcgcccaaaaagcccgcgcggcaggcatccatttgattcttgccacacaacgccccagcgtcgatgtcatcacgggtctgattaaggcgaacatcccgacgcgtatcgcgttccaagtgtccagcaaaatcgacagccgcacgattctcgaccaaatgggcgcggaaaacctgctcggtcagggcgatatgctgttcctgctgccgggtactgcctatccgcagcgcgttcacggcgcgtttgcctcggatgaagaggtgcaccgcgtggtcgaatatttgaaacagtttggcgaaccggactatgttgacgatattttgagcggcggcggcagcgaagagctgcccggcatcgggcgcagcggcgacgacgaaaccgatccgatgtacgacgaggccgtatccgttgtcctgaaaacgcgcaaagccagcatttcgggcgtacagcgcgccttgcgtatcggctacaaccgcgccgcgcgtctgattgaccagatggaggcggaaggcattgtgtccgcaccggaacacaacggcaaccgtacgattctcgtccccttggacaatgcttgattttttgcaaatggaaatgccgtctgaagactgtttcagacggcatttttatagtggattaacaaaaatcaggacaaggcgacgaagccgcagacagtacaaatagtacggaaccgattcacttggtgcctcagcaccttagagaatcgttctctttgagctaaggcgaggcaacgccgtaccggtttaaagttaatccactatatcagacatttgaattcggattattccctgacctgtcccgtgccttgtacgatgtatttgtaactcgtcagctctttcaaacccatcgggccccgggcgtggagtttttgcgtggagatgcccatttcgcaacccaagccgaattcgccgccgtcggtaaagcgcgtggacgcgttgacatacacggcggcagaatcgatatgagtcgtgaaatagtccgcagcgtggcggttttcggtaacgatgccgtctgaatggtgtgtgctgtgggtttcgatgtgccagaccgcctcttcgaccgaagcgacggttttcacagcgaggatgtagtctaaaaactcggtatcgaaatcgtctgcacccgccgcttcgccgccgatatgccgcgccgcctgcggatccaaacggaagcggatgggcggcagtccggcttctatgcggtcgcgaaccaacagccgttcgagcttgggcaggaagtcggcagcaatgtcttcatgtaccagcagcacttccatcgagttgcacacggacggacggctggttttggcgttgtacacgatacggagcgccttgtcccaatccgcgtccttgtcgatataaatgtggacaatgcccgttcccgtttcaatgaccggcacgacggcattttcaaccaccgcccgtatcagccccgccccgccgcgcggaatcagcaggtctagataatctttcgccctcatcatttcgtaactgctttcgcgcccggtgtcttcaatcagttggagcgcgtcggggtcgatgcgggtttgcgccaaccccgttttcagggcggcaacgatggcgcgtgcggattggaatgcatctttgccgctgcggagtacgaccgcgctgccgcttttcagtgccaaagccgccgcatcggaagtaacgttcgggcggctttcgtaaataatgccgataacgcccatcgccacgcgctttttgacgatttccaagccgttgggcaaagtcgaggtttccagtatttcgcccacggggttgggcagcgcggcaaccgccctgatgccgtccgccatcgcgcaaatgcgtttgccgtccaacaaaaggcggtcggtcatgctttcgggaatgttgcctgccgcggcttccaagtcttgacggtttgccgccaaaatatctgccgtcgccgcttccaagctgtccgccatcgcaagcagcgcgcggtttttttcttccgtatccgccgtgttgacggatttttttgccgctttggcaagggcaagctgtttttgtgtgtttgacatgggtttccttttctaaaattcggtcagaagcaggcgtatttcgggcgtgatggaaatccagtcgtcccgatggatgaacacgcctttcgccttacgcgatttgagcaggtcttcggcggcggcagagccgaacaggacgcgccctttgcccaggggctgtttggttgccttgctgtacacggttacggtgtccatacgggaaaaatgcccttcgattccggcaatgcccgacatcagcaggcttttcccctgttcggacaaagcgtgttccgcaccttcgtccacataaacgctgccccggctttcggaatagaacgccagccattgcttctgcgtccgcaaacctttggcacgggggacgaaaaacgagccgtccgcctgatgttcggcagcttcggcaagtgcatcgggtttgagcgaggaacagatatacaccggtacgccggattcggcggcgatggttgccgctttgattttggtcagcataccgcccgtgccgtttgccgaacccgagccgcccgccatttcgatgatttcatggttgatgtgttcgattttgtccagccgtacggcatcgggattgctgttcgggttgcccgtgtaaagaccgtctatgtcggtcagcagcaccaagaggtctgcctgtatcatcgccgccacttgcgcactcaatgtgtcgttgtcgccgattttcaattcctcaaccgaaaccgtatcgttttcattgatgatggggacggcgcggcgttgcagcagcacggaaagtgcgccgccggcattttggtagcggcgtttgtcggcaaagtcggcgcggctgagcaggatttgcgcggacacgatgccgtctgaagacaggtttgccgtatattcttccatcagcagcccctgcccgacggcggcggaagcctgtttgtcggcgattttgaccggacgttttttgaaacccagcgcaccgaaccctgccgcaaccgcgccggaagacaccaagaccagctcgtgtcccgcatgatgcaatgcggcaagctggcaggtgatggtttggattttgccgcgcgagagactgccgtccgaatgggtaatcgaagatgtgccgactttaaatacgattcttttgtatttcattgtttccgtccttgttggtttgtcctgtctcgttgccaccttgtgccgccgaatttgccctgttctgccgcaattgtcaacaatcacgccgcgtctgcaataaaatggacaaaatgtataaaattaataaaatctatggcggcttattgagatttttcaaatttatattgccgttttgtccaaaatgcgtataatcctgtccatatttctgctgtaggctgatttattttagacaaggactaccatgcaattagatatagaccgcttggttgcttatttcggcggcgtgaacgcgcttgccgaagcgttgaaacagcacgatcccgaaaatgccgcgacgaccgccgccatctataaatggcgcacgcgcggctcgctgcctctggcgcaactgcaaaagctgaccgcgttggcggaagcgcaaggcaggccgctggatttgaatgcttttttacaaaaaaacgaatctctggagagaacagaaatgacacagaccaaccgcgttatcattttcgacaccaccctgcgcgacggcgaacaatcgcccggcgccgctatgaccaaagaggaaaaaatccgcgtcgcccgccagctggaaaaattgggtgtggacatcatcgaagcgggttttgccgctgccagcccgggcgatttcgaggcggtcaatgcgattgcgaaaaccattaccaaatcaacggtctgttcattgtcccgcgccatcgagcgggacatccgtcaggcgggtgaggccgttgcgcccgcgccgaaaaaacgcatccacaccttcatcgccaccagccccatccatatggagtacaaattgaagatgaagccgaagcaggtgattgaggcggcggtcaaagcggtgaaaatcgctcgtgaatacaccgacgatgtggaattttcctgcgaagacgcgttgcgttcggaaatcgatttccttgccgaaatctgcggcgcggtgattgaagcgggcgcgaccaccatcaatattcccgataccgtcggctattccatcccgtataaaaccgaagaatttttccgcgaactgattgccaaaacgcccaacggcggcaaagtcgtttggtcggcacactgccacaacgatttgggcttggcggttgccaattcgcttgccgcattaaaaggcggcgcgcgtcaggtggaatgtactgtcaacggcttgggcgaacgtgcaggcaatgcttcggttgaagaaatcgtgatggcgttgaaagtgcgccacgacttgttcggcttggaaaccggcatcgataccacgcaaatcgtgccttcgtccaaactggtgtccaccattacgggctatcccgtgcagcccaacaaagccattgtcggtgccaatgccttttcgcatgaatcgggcatccatcaggacggggtgctgaaacaccgcgaaacttacgagattatgtccgccgaatcggtcggctgggcaacaaaccgtttgagcttgggcaaattgtccggccgcaacgccttcaaaaccaagctggcggatttgggcatcgagttggaaagcgaagaggcactgaacgcggcatttgcacgcttcaaagaactcgccgacaaaaaacgcgaaatcttcgatgaagacctgcacgcactggtatccgacgaaatgggcagcatgaatgccgagagctacaaattcatctcccaaaaaatcagcaccgaaaccggagaagaaccgcgcgccgacatcgtgttcagcatcaaaggtgaagaaaaacgcgcttccgcaaccggttccggccccgtggatgcgattttcaaagcgattgaaagcgtggcgcaaagcggcgcggctttgcagatttattccgtcaacgccgtcacgcaaggtacggaaagccagggcgaaaccagcgtccgtctggcgcgcggcaaccgcgtcgtcaacggtcagggcgcggataccgacgttttggtcgccaccgccaaagcctacctttccgctttgagcaagctggaatttagtgccgccaaaccgaaagcgcagggcagcggtacgatttgagcgtgaaaacagacgatgccgtctgaagcataaaaaggcttcagacggcattgcggcgataatagggcgcaaaacccatttgaaaaggaaaatgatggattcccgaaaatttaccgaagcatccaaacggcggttgagcgaattgttggatgccaaaagcgaacaaggcaacacgatgcgttgcgacgaggttcaaggttttatgacggcgctgttgagcgggccggacaaattgacaccgctcgactggctgcccgaagtgttgggcgacgaatcgcaatttaccgccgccgaacgttccgaaatcgaacggctggttttggcaatggcgatggaaacaaccgccgcgatgtcggataaaaaactgcccgatttgtggctgtatgaaaacgaagacggcggcagcgatttttacacatggtgcaatgcttatctttacggtttggatattgtgccgaccgattggtttgaagccgtcgatgatgaagcgtttgaagagttgttttatcccatcatggcattgggcggtatttacgacgaagaggaaaacggcgctatccgtctgcaattcacagaaggcgagctggcggaactggaatccgagttgccttatgcattggcggatatctaccgctactggcaggcagtcatcaacaaaccgcaaaccgtccgcagggaaggcgaaaaaacaggcaggaacgatccctgtccgtgcggcagcggcagaaaatacaaggcgtgttgcggtaagaattgaagcgtttgtttccatgaaccaaacgtaaaaataccgtctgaaaccggatttccatgtttcagacggtatttttcacaggcggtcagtgctgttttttcatgccgaaccggacaaagccgacgatacccaaaacaatcatcgggacgctcaaccattgccccatcgacagccccaaggtcagcagcccgagatagtcgtcgggttggcgtgcgaattcggcaatgaagcggaatatgccgtagccgccgaggaagagcgaggcgacttgtccggtcgaccgctgttttttagagaacagccaaatgacggtgaacaggcagatgccttcaagtgcaaactgataaagctgcgagggatgacgcggcagcataccgtattgttgcagccattctgcccaaagcggattgtgcgcggcggcttcggcatcttcgtaacgcgcctgcgggaagcccattgcccaaaatgcgttgatgtcggtaacgcgtccccaaagttcgccgttgatgaagttgccgatacgtcccgaagcgagacccagcggaacgagcggtgcgaccgtatccatcagtttgaggaagccgatgccgtgtttgcggccgaacaaccgtatggcaataactacacccaaaaagccgccgtggaacgacattccgccttcccataccttgaaaatatcaagcggatgggcgaggtagtcggaaaacttgtaaaacaggacgtaacccaaacgcccgcccaaaattacgcccaaaatgccccatgtcaggaagtcgtcgagcgattctttggtaaaaacggacaagccttgcgcgatgcgccttctgccgagaaaggtaaaaagaataaatccgaggatgtagcttagggcataccagcggacggcaagcgggccgatactgataaggacgggatcgaattggggatgggtaatcataacgggctttcgttttcaaatgccgtctgaaaggcatgatgcttcagacggcatttctgcaataagggtttcagcgcaaatcgccgatgacgttgaggatagcggacaacgcggcttcgcccagccgtaaagaacgctgaccgttccagccgaagtcgtcgtcgggcagattggcattgtctttgaacggcatttccagcgtataggcaaggcagttgaaacggttgccgacccagttggtcgccaaggtcatattcgcttcgcccggcgcatctttttcgtaaccgtattcgtcttggaaatcggggctggcgtttaaaagggcatttttaaactgcgcttccaacgcggcgatgcgcggattgtagttcggcacgccttccgtacctgcgacaaagacaaagggcagcccttcgtcgccgtggatgtccaaaaacaaatccactccggtttccagcattttttcgcgcacgaagaacacttccgggcttttttctaccgtcgggttttcccactcgcggttgaggttcgcgccggcggcgttggtacgaaggttgcccagtgccgaaccgtcggggttcatattggggacgatatagaacgtggcgcggtcgagcaaggcgcgggcggtagggtcttgcgggtcgagtaatctgccgagcagcccctcgataaaccattccgccatggtttctcccggatgctggcgggcggtaatccagattttcaaatcgctttcgacctgattgcctatggtcagcagattgatgtcgcgcccttgcacggtgctgcccaagtcgtcgatgcggcacaggccgctgccttgcgcgtcgccgaggaggtttaaatgctgttcttcggagtaaggttcgaaataggcgtaatacacgctgttggacagcggagtatgattgacggtcagtacgccgttttcgtaggaagtcggtacgcggaaccagttgcggcggtcgtatgaggcacacgcctgatagccttcccagcctttcgggtaggcggcttctgccgcgttttcaaaatgcatgatgcagttttgatatgccgcgccttgcagccggaagtagaaccattgtgcaaaatcggaggcgttgtcgggacgcagggcgaggcggatgttggaaggatcggtcaggtctttgacgacgaccgagccggcatcgaagcgggtgctgattttaatcatgggaaagtccttgctgtcgccggtttctcgaaccggataaaccgcgattttaccgcccgtatcgcaaggcttcaacctgcccgaaagtctgccggatgccgtctgaagattgtttcagacggcgtttggcgttaacataagccgaaattgtcaacaatagggagccgttatggagtctgaaaacattatttccgccgccgacaaggcgcgtatccttgccgaagcgctgccttacatccgccggttttccggttcggtcgccgtcatcaaatacggcggcaacgcgatgaccgaacctgccttgaaagaagggtttgcccgcgatgtcgtgctgctgaagctggtcggcattcatcccgtcatcgttcacggcggcgggccgcagatcaatgcgatgcttgaaaaagtcggcaaaaagggtgagtttgtccaaggaatgcgcgttaccgacaaagaggcgatggatattgtcgaaatggtgttgggcgggcatgtcaataaagaaatcgtgtcgatgattaacacatatggcggacacgcggtcggcgtaagcggacgcgacgaccatttcattaaggcgaagaaacttttgatcgatacgcccgaacagaatggcgtggacatcggacaggtcggtacggtggaaagcatcgataccggtttggttaaagggctgatagaacgtggctgcattcccgtcgtcgcccccgtcggcgtaggtgaaaaaggcgaagcgttcaacatcaacgccgatttggtagcaggcaaattggcggaagaattgaacgccgaaaaactcttgatgatgacgaatatcgccggtgtgatggacaaaacgggcaatctgctgaccaaactcacgccgaaacggattgatgaactgattgccgacggcacgctgtatggcggtatgctgccgaaaatcgcttctgcggtcgaagccgccgtcaacggtgtgaaagccacgcatatcatcgacggcaggttgcccaacgcgcttttgctggaaatctttaccgatgccggtatcggttcgatgattttgggcggtggggaagatgcctgaagcaaagtcggaaaatgccggctttggcggaaaacctgtttgtctggtttctgtttttggggtttcgggcaatttccaaaccgtcattcctgaaaaaatatagtggattaacaaaaaccagtacggcgttgcctcgccttagctcaaagagaacgattctctaaggtgctgaagcaccaagtgaatcggttccgtactatttgtactgtctgcggcttcgtcgccttgtcctgatttttgttaatccactatagaaacaaaaacagaagcctaagatccgtcattcccgccgggcatctggttttttgaaatccggttgtttgggataaattctccggctttgattttttgtttttccgataacgccataactttgaaatttcgtcattcccgcgcaggcgggaatctagacctgtcggcacggaaacttatcgggaaaaaaggtttctttagattttatagtggattaacaaaaaccagtacggcgttgcctcgccttagctcaaagagaacgattctctaaggtgctgaagcaccaagtgaatcggttccgtactatttgtactgtctgcggcttggtcgccttgtcctgatttttgttaatccactatacgtcctagattcccactttcgtgggaatgacgggatgtgggtttttgtgcggatttgaaccggtaagggtggtgtgggattggtggtttgcttaggatcttttggattgtattttgtatatacatttacttgttgataaaagataaaataaaattagaaactaaaagtgagaaaaaattaataataatagggatgtataaatgtaaaggctccgtttcatagctaaggttatctgaatatatggaaaaaaagtaaaagtccataaaactaaaatatatagataatgctaatgataatagaattatcactttcctagagtaaggataatatttttttatcgtaaaaaaatataaaataggataaataattgccatatagatagattttgtaacaaaattaaaaataaataataaaaataatgtaataaagtatattttttggctatgaaataaaattgtacataattgaacgagcagatcaaaaaatgaactacatataacaataaataataacgtatttaccatactaaatttaataggtctcattatcatatttaataaccacttcatagtatagtggattaaatttaaaccagtacagcgttgcctcgccttgccgtactatctgtactgtctgcggctttgtcgccttgtcctgatttaaatttaatccactataaatgcagagtgggtggaaacactcactttatggtttgctacgctctgctcaattagcaacccgataacccaatatggataatagggtaattaatccaatctaatttgtcagcatccgttaatttattgcaaaataaagtattgaattatgtcgggtgcaaatgacgaaatataagtttccgtgcggacggatcaagattcccactttcgtgggaatgacggtggaaagattgttgtttttcccgatgaattcctgtgttttttgtttttccggataaattcctgtggctttgagttttttggatttcagcctcaatgccgtctgaacgccgaatcgggcttcagacggcattgcgtcatttgaaattcaaaaccggccagcctttttctttggcttctttttccagctcggcatcggggttgacggcgacgggttcgctgacaaggcgcagcagcggcaggtcgtttttggagtcgctgtaaaaataggttttgccgtagctttggagcgtttcgccgcgttcggcaagccattggttcaggcgggtgattttgccttctttgaggctgggcgtgccgatgtaattgccggtgtagcggccgtcagaaccggtttcgagttgtgtgccgatgatgttggtgatgccgaaaaggtggcagacgggggtgatgatgaactcgttggttgaggaaatcacaagggtttcgtcgcctgccatttggtggctctgcaccagcatacgctgcataggcgagatgtgggggatgatgtattccgccataaattcgcggtgaaactctgccagctcttctttgctgtaacgagcgagcggggcaaggtggaatttgaggaatgcgtcgatgtcgaggcagccgttttggtagtcgcggtagaatttttcgttttgcgcttcggtttcggcagcgtcaaccaagccttttttgatgaggtattgcggccaggcgtggtcggaatcggtgttgatgagggtgttgtcgaggtcgaagatggcgaggtttttcattgggtttcctgttgtttcaaaagctggcgcaaaagcggcagggtgatgcgtttgcccatcgtgacggcgtagttgtccagcgtgtcgagcatcatcatcaggctgtccatatcgcgccgccagtgtttgagcaggtattcgaaaatttcggaatcgacggttacttggcgtgccgccgccatactggcgagcgcgtcgattttttcttggtcggttaagggtttgacttcgtaaacgaggcagtacgccatacgcgtccgcaaatcttcgcggatgacaagctgctggggcgtgtattccgaaccgagcagcaaaaagcctttgccgctgttgcggaagcggttgaagatggaaaaaagcagggcttgttcttcgttgcccagtttttcgacttgatcgacggcgaggtattccgcctcgaacgcggcatcggtcagcggcatggaggcggcatcgatataggcggcgtttttgccggcttcgagcgcctgtgcgacccacgcctgcaaaagatggcttttgcccgcgccttcttcaccccagacatagataaactgtccgtgtttgtgtcggaggacatagaccagttccgcgttttccgtgccgaggaatttgtcgaaactcggatagtcgtgtgcggcaaagtcgaaaataagctggttcacggttcggcattccgaggggtggtaaacgggtttattgtacgttgttttcgcgcgcctttccaatttgaacgatgccgtctgaaaacggcttcagacggcatcgttcaaccgcaggcaacgttgccgacatcgaggcgcatattgtggaacgcgttgagcgtgctgcggtggccgatgctgatgatgatgctgtcgggcagtttttgtttcagtgcgcggtagagcagggcctcggtcggttcgtccaaagcggcggtggcttcgtcgagcaggacgattttgggcttggaaagcagggcgcggacgaaggcgacgcgttgcagttcgcccggggagagtttgtgttgccagtcgtcggttttatctaatttatcaaccagataacccaagcggcaggtgttcatggcttcggctaactcgggatgctgcttgtcaatgtcggggtaacaaaccgcgtcgcgcaggctgccctgtgccgtgtacgggcgttgcggcaggaagaggatgtcttgatgcggcggacggctgactttgccgctgctgccgaacggccaaagccccgccagcgcgcgcaacagcgaggttttgccgcaaccgctcgggccgcgtatcagcagggaatcgccgtttttgaggtttatgttgatgccgctcaacaggatttcgccgttgtggcggaacagagcgacgttttcctgtgggggactgttagtttttgcacaaggaacaaatagagtaaaaaaacgctgaaatcttcggaagacgtggatttcggcgtttttttgtatccggaaaagttacgccagctttttcacaaaaccgcgccggaatgcgcggttttctgtttaaagctgacgagattagggaatttttaaaactgttttaagaggtttttaaaatggatttaatcaatactccggccataccattcaacacggcctatgatggcgatgtcgtcttgggcattgctcaaatctatttcaaacggtgcgtaacgtggattttcagacgttacaagcagtttgcccggtatacgttgcacacgtttgacaaagaggtcattgcctatacgcaagacatataggccgtcacgcgggtcagtttcggcgtggttgatgagaatggaatcctcatgattgagcacgccctccattgaatcgcctttaacggtaattacagacagtttttccggctgtttggtcacatagttgtcaatccaatatttccggaaagccaagcagaataaaggttcttcgccgaagactggtgcgccataccctgctgctgcggctacgttgtagcgcggcacgaatacaaactcggacaggtcgacaggattgcccatagtgtcggtgattccatcagaatttctacttacagagaatgctccggcgttttccggcctggctttatcgagatacggcaagccttttccggtcagcagccagtttaaatcacaactgaatttttactaggtaatcggctgttgggatagctccctctttccaaactctattaaatccagaagccgacatttctattttgttatagatgtcagatggcttagccccatgaggccaaagaaatttgagcctatctaaaaaagtatccatagtaatcctaatttaactcatttaagcaaaacattaagcaaaaaaagaaactcttttgcttaaataagattactcaaataatcaatattttgtaaaaataattacgtttttgagaaaatattttagcaaaagagtttcatgaagctgttttgctaaatgtaattcactcatttgctaaatgacggcggttaataaacctacttaattaaggaattgcgagaatgaaaaaaagcaagaaagcatgactgattggcatcgtgctgacattgtggctcgtcttaaaaaggcaggctggtctgtgagagcgttatctatcgaggctaatttagcaccaaatacattagggaaagctttagatgctccttatctgaaaggcgaaagaatcattgcagcagcgattggagtacccgcagaagaaatctggccatctcgttttgagaaacgaaaccataagccaaccttcccaagatctataaatagataactgttttgctaaatagttccaaaagagtaccgcatttaagcaaaaatagaaagcggaaaaaatgaaaatatctgcatctgatattgcgaaattaggaattccgagcctaccaactgatagacaagggattgaataccatgccaagaaaaataattggcaacactgttttgagcaaaaaggaagaggccgtcctaaaaaactgtatgaaatcgcttccctccctgccgaaatccgagcagccatcatgaaacggcagtcggacgagctggcggagaagatgccgaaaatgctgcccaaagtcagaccggggacggcgatgtcggctcaagcactggctgaagcggccaagctgttgaacgagaaacaacggtcggtggcggatgcgcgatgtgcggtggtagcggcggtattggggattaaatacgaatacgattgctctgccaaggctgcggtggctcagtttttgggcttgctggcagaaggtaaattggacgcggtcacgcttgggaacttggaaaaggccaatgaccgcagccggacggcgaaggtcggcgaacgtactttagacggctggatttctgcttatttgaaagcggaaaacgcgacggagcggttggttgctttggctccgaagacgacgaaggcggtcaagccgattgaaagttacggatggttgccgatgtttatgcagtttcacaatattccgtccgcgccaaagctggcgcacagctaccgctggtttgtgcagtgggcggaagcggaaaatatgccggtcaatgatgtgcctaacttgagtatggtgcggcgcgtttgggaaaagctcccgttgattatgcaggagcgcggcaggaaaacgggggcggcttataaatcgctgctgccttatgtgaaacgtgattggggggctttgaagccgaacgatgtttggatcggcgacggccatagctttaaggcaaaggtggcgcatccggtacatggcagaccatttaagccggaagtgacggtgattattgatggttgtacgcggtttgtggtcgggttttcggtctctcttgctgaaagttgtgtggcggtatcggacgctatgcgtatcggggtcaagcattttggtttgccgattatctattactcggataacggcggcggccaaaccggcaagacgatagaccatgaaatcacgggtattacgtcccgaccgggtatccgccatgaaacgggtatcgcgggcaacccgcaagggcgcggcatcattgagcgatggtggaaagacaatctgattgagatggcgcgccagtatgagacgtttgcgggtgcagggatggacagcagcacgaagaacctgatgtaccgcaagatggaaagtgcgtttaacgctttggaaaaaggcaaggatttgacggaggaacaacagaaatatttgaaaaaactgccgagctggtcgcgttttatagcggatgtggtcaagtgtatcgacgaatacaacaaccgcccgcacggcgagctgccccgacatcctgacggcgggcattatacgcctaaggcttatcgggaaatgaggctggaacaggacggtatcgcgccggatatgttgtcggcgcaagagctggcgacgatgtttatgccgcaagaggtgcgaaaggtacagcgcggttggctggatttgtttaacaactcttatttctcaaccgagctggcggagtatcacaaagacgaggtacgggtcagctacgatttgagcgatgcgtcggcggtcaatgtgtttgatatggacggcaagtttattactaaggcgcaggccaacggcaatacccgcgaggctttcccgacggctcgtatcgaccaactggcggaaaaacgtcgaaaaggcaaaataaagcgggcggaaaatgcaatcaagctcgcaaacgcggaagtcaatcctgctctggaacaggctgcggtttgggacgagctgggacatttgggcggaaacgacatcgaggcggagtatgcggtattgccgaaaacgggcacagacgattttgtgttgtttgaggcggatagataaaggaaaacatgatggacaaacagcaaaatgcagcgttttcggccgagcttgttgaaaaattgaaactcaagcgagctcttgggcggattcaacgagctcaagcaaagattcaaggtgttcccgctgaacggaatcaggctcaaacgtttttgcctgcgcttgaaggaaactgcgaacctgctcaatcgaagtcggctcttgacgggtaatccgctggagcagccaggaaagtacgaaagaatcggcaagtgacctgtcttccaagtcttgaacggcgacttccagcatgatcaggcgtttttctaaatcgggaaactctttcatttcagacggcctttaaaggttgtttaaaactcaaggatattaaaaatgaaacaaattaatcaagcattgcaacaaaaactggttgaatttaaagaaaaatcaggcatgaaccaaacccaactggcacgcggtatcggtacttcgccggcatccatcagtatgtatctgaacggcacttatgcggaaaaaggcggcaattatgaaaccatcgagccgaaaatcgaggcgtttttggagatgcaggacagtaaagcgcaacgcgaagagctggtgttgggttttgtatcgactaagacgacccgccgtattgcagaagtgatgcgcgatgcgcacgaaggcggcgaaacagtggtgatctacggtcaggcgggattgggcaagactcaggcggtcaaaaactactgcgagaaaaaccctgcggccatcttgattgaggctaatccgagctttacggctttggtcttgatgcgcaagttggcgactgcggcgaaggtatcggcgatgggcagcctgaatgatttgtttgagtctgtatctgaccgcctgcgcgattcgggccgtctgattgtggtcgatgaagcggaaaacctgcctttacgcgcccttgaaattgtacgccgtctgcacgacgagactggctgcggcttggtgttgagcggtatgccccgactggtggccaacctgcgcggtaagcatggcgaactggtacagctttacagccgcgtgtctgttgcgctgaatttgggcgaatctttgccggatgacgaactctttgagattgcgaaagcggctttgcctgatgcggtcaagcatctgctccctgatagtgtacaagcgttgattacggtcatcgggtttaatgaaacgctggagctggtgcgcctgatgggcggtacgacttatcctttgcggcagggttatacgaaaaacagtcaatcccgtgttgcatacttggaagagattatcggcagtgaggcggccggtcggctggtggaggcaatggctccgtgcaatctgtttataccccgttgcgagacggccttgtatgagttgcgaaaccgtaaaatccgcagtcagtttgaccggcagacggcaggcggtacccctgcttatgaggccgttaacgatttggccttggcacaccgcctaagcgaccgccatgtgtggcgaattttaaagcaggcggataaggaagcggagcaggagaatttgttttagaatggaatgccatgcagatgtatggcattttattttggagaaaaatatgaaaaagttttattttgtgctgctggcgttgggtttggcagcgtgtgggcaagaacaatcgcagaaagctgatgcggagcagtatttttttgccaataaatatcaatttgcagatgagaaacaggctttttattttgaacgcgccgcccgtttccgtgtattgcaacaaggccttggcggggattttgagaggtttttaaaaggagaaatacctaatcaagaaaatcttgcaaagtatcgtgaaaatattactcaagcagtcgcttattatgcggacacgaatggagatgatgacccataccgcgtctgcaaacaggctgcgcaagatgcagaaatcctgatgaagagtatggtaacaagcggtggaggcggtacaactgatttagataaggaaagttatcaaaattaccgaaaatcaatgcaagaatgccgtaaaacaataacggaagctgaagccaatttgccgaaaaaataaaataaacgattctaaggccgtctgaacaacaggcggcttttttgttgcctactgacactgtttcgcccgctgcaaaagccatgccgtttgaaaatgtaagcctctgaaagtgcattttaatctgattttgagggaggctttaatgagcaaaattatttgtctgactgccggacacagtaacaccgacccgggcgcagtcaacggaagcgaccgtgaggcggacttggcgcaggatatgcgcaacattgtggcttcaatcctgcgtaacgattacggcctgaccgttaaaaccgacggcacgggcaaaggcaatatgccgctgcgcgatgcggtcaagctgattcgcggctcggatgtggcgattgagttccacaccaatgcggcggcgaacaaaacggcgacaggcatcgaagccttgtccacgccgaaaaataaacgctggtgtcaggtgctgggcaaagccgttgccaagaaaaccggctggaaactgcgcggcgaagacggctttaagccggataacgcagggcaacattcgcgcctggcttatgcgcaggcaggcggcattgtgtttgagccttttttcatcagcaacgacactgatttggccttgtttaagacgaccaaatggggcatctgccgcgcgattgcggacgcgattgcgatggaattgggagcggcgaaggtatgaaaaagtctttgattgctttatgtgttgcccattgtgcaaagttgaaaaacgattttggcgtaccaccgttacctgaaatcaaaatcacgccaagccctgttcgggtaggctctttgaaacaacatccgagcctgcgcttgggtaaatcaggcgtggcggctgctaaacgtgcggcgcgcaaacgcaagaatcgtcgttaatcatgggacaggttgcgttttacgaaaagatgattgggctgtggtcggccaaaagccgtgaggcaagcgaacaggcggacttggctgcgtttgaatttgcggagggcgaactggccaattatcgggaaatgctgaaacggcacctgcaaaccaaaagtgtggaatagcaatgcgtattttggatatttttaaaaacccggcgacaggcaatgtgtcgcactcgaaactgtgggcaaacgttgcctgcgcggctgggacgtttaagtttgtgatgttgcccgatccgtcggcggaaatttgggcggtgtatttgggcattgtcggcggctatgcggtggcgcgttcatttgtcagcgtgaagcgtcaggaggtcgagaatgaatctcgtgaaactgctggcgaataactggcaaccgattgccattatcgcgcttgtcggcacgggcttggctgtgtcgcaccatcaaggctacaagtcggcatttgcgaagcagcaggcggtcatcgacaagatggagcgcgacaaggcgcaagccctgctgttgtcggctcaaaactatgcgcgcgaactggaactggcacgcgcggaagctaaaaaatatgaagtcaaggcgcacgctgtcggcatggctttggcgaaaaaacaggcggaagtcagccgtctgaaaacggaaaataaaaaggaaatcgaaaatgtccttactcaagaccgtaaaaatgcaagcggcggttgcattgacggctttggctctcacggcctgcagctctacaaccgcgccctcggctacggaaattaaggttgtcgaaaaggcagtcatgccgaccccgcctgctgcattgatggtcgcgccggtacgcccgaatccgccgaaagacggcaagacggccacgctgttggaacacgccgctgagtttggtggctatgtggcggagttggaaaatcaaaatcaggcttggcgcgactgggcgggcaatcactcccgcaaagtcggaaactgacaaaaaagcccgcgtagggcgcgggctgagggtgaaagcggattttatacctcttttacaggggtagcggcggtagtgcttttcagcaaatcgactgcgtgctgacagttttgcttgctggtgtagccttcgccctgagcgatgatttcatggttggctgctttcaaacgccaacggtattcgccttttgcgtctttatagatttcaaaatacataaggtttctcctatgaatgagtacacgttttcttaccgctttaacggcaagtcctggtcattgagcatttgggcggacaaccctgaagaagccagggcgaaatttcgggctgcacgagaaaatgcgcactatgacggcgaagttgtagcaaaggtttatacatttgtaaatatttcgtgggttaagaaattgtacaagcggacaaaatatttaatgggtatcaaagaatgacctaccgtgaattagttgaacgtcagttggctgtgcgccatgccgatttggaattgggcttaagccgcgcacgcgagcaagagccgtttgtcattcatgtttccgatctgttggataaggcaggcattgagtacgcggtacgcatggataaggattttcagacgacgtttcaccttgaatatccaattacgaactatgacacctttaaacgtgcggtttggcaaactttgggggcgtattactgtgtttgtaatgatggtgatggactggagattgccagcaatcgccctgacggttacgccgtccgtatcgtattcggcgatgtgccggtttaaaggggttttaaatggactttgaatttggtttcagaaccctgtggccgattgcgacggcggcattttggttttgggtcaacggcatttcaggccgcctgaaagaggcggacaagcgtatcgacgaccttaaagaggagttgcacgcggtcaagctctcttatcacaccaaggcggacgccaaggcagacagcactaatattgcggcggccttggagcgaattgaaaacaagttagaaaaagtaaacgaaaaactggacaggaaagcagacaaatcatgagcgacccgattttggatgccttggcgcgtattgaaaacaagactgatcaaacgctgaaaaatcagaaggaaatgcaggcggaaattgcgcaaattcgccaagacacgaaacgcacggccattacattcggcgcactgggcggcggcgtgattacggtcggctgggaattgcttaaagcgaaaatgggactgtaattatggctcacccgcaagaaatccgtgaaaagttacgccggctctatgtgagcggcgagcaaactttggaaacggcggccttgatgtgcgaaatcccgcagaccactgcgcgtgcgtggaaacgtgcggataaggaaaaaggcgacgactgggataagatgcgcgccgcttacactttggccggtggcggtattgaggatttgagccgtgcgatgttggccggttttatggtgcagtacaacagcacgatgacgatgctgcaggattcgagtaccgaagatttgccaccatccgaccgcgccaagctgttggccagcctggccgatgcgtttacgaaaaccgtatcggccaatgcgcgtgtgatgccggaaacgtcaaaactggcgacggctttggaattgattgagttcttgatggcgtttgtacaagaaaaacatcccaaacatttgcctgcctttgtggaggtattggagccgtttggggtggaagtggagaagaagtttggttagaggccaacaaatttttttaaaagagtaatgagggtggcggcagggatagcattaattgcattttccgtaagcgtacttaatgcagtgtccttgattttccctaattcttttttcaaccagcttttttctgaatcagaaatctctgcttggtctatttttgccgcaattaaagcctgaatagtgtcgctgtgtagtttgactgtgacaacaccaagaatggcggataggccgccatcatcggtaaggaagtctatgcccttatgattaattttgcagtcaaaatttttatgaagtgaatctatcgaagtaatttcaattaaaccagattcttctaagtaataaatattttttaaaaaatattggaattcatctgattgtaaagttgctaggtgttgactttgaatttcacaaccaagagtcaaagccaagcccaatccttgtttatcaacagggatgttagaagtaataggtaaagaactactagggaaaagagagttatacaccttggttgcttttaggcagttcgggtaattatcacttaaaactcgtaagattttttcctgaatacctctatttaaccagttcataaattattcctcatgaaaacaaaagaattcctcaaatcccttgccgaactggccgccagtttgcgccaagtcatcgaagcggaagtggacggcttcgatgcgtcgcccaaggctattgctgcacgccgtgccaaggtgtttgacccggtaggcggttacgagtatttcgtgaatacctacttcccccattatatccgctcgcctgagaaatccgaactgcatgcgtttttattcagccgtctgccggagattatccgctcccccaaaggggaaaatgaggcggtgggtgcgccgcgtggagagggtaagtcgacgaaggttactcagttgtttacgctgtggtgtattgtgaccggccaaaaacattatgctgttattgtgatggacagtatcgaccaggcatatccgatgctggaagccatcaaggcggaacttgaatttaacccgcgcttgaaaaccgactttccggaagtatgcgggcagggccgtgtatggcaggccggtacgattgtgacggccaatgacgttaaagtccaagtggccggtagcggtaaaaagctgcgcggtttgcgtcacggcccttaccgtcctgacttaactgttttggacgatattgagaatgacgagcaagtccgcaaccccgaacagcgcgacaagctcaatgcgtggctgactaagaccgtattgcctctgggcggtgtcggtcagaaatacgatgtgatttatatcggcacgattttgcattacgacagcgtacttaaccgcactttgaataacccgttttggcacggtattaagtttaaggcgatgaaacgctggcctgaccgcatggatttgtgggacaggtgggaggaacttttccgaaacgacggcgagacggtggccgaggcgttttatcaggcaaacaaagacgagatggagcgcggcgcggtcacttcttgggcggcgcgtggcgtactcgcgctgatgaaaatccgtgcgcgtgacggccatgcgacgtttgattcagaatatcaaaacgatccggtcagtggcgaagatgcgccgtttgccaagtcgatgaagttttggaacgacctgccgtccgatttggtgtatttcggtgcgctcgacccgtcactcggaaaggccggggcgagccgtgacccgtccgcgattatcattggcggttatcaacgtgtaaccggcaaactgtatgtcgtggaggctcagattaaaaaacgtctccctgatttgattattgaggacgttattcgattgcaccgtcaatatcgttgcaaactgtggtttgttgagactgttcaatttcaggaatttctgaaagacgagctggtcaagcgcagcgcggcgcgtggaatacctgtcccagcgcgggcggtcaaaccggtatcggacaagctgttgcggatcgagactttacagcctcacatggcgaacggtttgattctgttgaatgagagccaacaaacgctgatacagcagttccgccattttccaaaggctgatcatgatgatggtcctgatgccgtgcatatgctctggtcgggggcggtggccaattgtgtgccgatagaatggcaaagccctaccgataacgattttgatgacgagataaaaagtaaatggagccgataatggcaaaaaagaacaataaaactaaaatccaaaagcccgaagctgcattgcagacggacgtggctcaaattacggcgaccggtcgggttatcgccgagcatccgtccaattttattacgccgcaaaagatgcgggccctcttcgaggacgcagaaagcggcgacatccgcgcccaacacgagcttttcgcggacattgaggagcgcgacagcgacatcgcggcaaatatggggacgcgcaaacgcgcgctgctgacgctcaactggcgcgtcgccccgccgcgaaatgcgacgcccgaagaagaaaagctgtccgaccaagcctacgaaatgatggacagcctgcctaccctcgaagacctgattatggatttgatggacgcggtagggcacggattttctgcgttggaggtcgagtgggtattttcagacggcctttacctaccccgaaactttatccaccgcccgcaaagctggttcaaatgggacaaagacaacgggctgctgctgcgtacccgcgaaaatccggaaggcgaagcgttgtggccgctgggctgggtcgttcatacccaaaaatcgcgcagcgtccagcaggcgcgcaacgggcttttccgcacgctttcctggctgtatatgttcaaacactacgccgtccacgattttgccgagtttttggagctgtacggcatgcccatccgtatcggcaaatacggcgcgggcgcaaccaaagaggaaaaaaacaccctgcttcgagcggtggcggaaatcggtcacaacgcggcaggcatcatgccagaaggtatggaaatagagctccacaacgcggcaaacggtacgacggcaaccagcaatccgtttttgcagatggccgactggtgcgaaaaatcggcggcgcggctgattttggggcaaacgctgaccagcggtgcggacggaaaatccagcaccaacgcgctgggcaatatccacaacgaggtacgccgcgatttgctggtgtcggacgcaaaacaggtggcgcaaaccatcacaagccaaatcatcggaccgttcctgcaaatcaactatccccatgccgacccaaaccgcgtgccgaaatttgaatttgacacgcgcgagccgaaagacatcgcggtctttgccgacgctatcccgaaactggtggatgtcggcgtacaaatccccgaaagctgggtgcgcgacaaactggtcattccagatgtgcaggagggtgaggctgtgttggtgcggcaggtaccggacaatccggtaaacagaactgcattggcggctttatccgcccacaccgtaccatctaaggctacgggcaggcatcaggaaatattggacggcgcgttggatgacgcgctggttgagcccgatttcaattctcagctcaacccgatggtgcgtcaggcggttgccgcacttaatgcttgcaacagctacgaggaggcagatgccgcactgaatgcgctttatccgaatttggacaacgcgaaactgcgtacctatatgcagcaggccttgtttatcagcgatattttgggacaagaccatgcccgcgcctgatttgggatttgccttaagtctgccgccaaaaaaggcaatcgagtggctggaaagtaaaaaggttacggcggagagctaccgcaatctgacagcctccgaaattgccaaagtctatacgattgcccgcatgaccgacttggatatgctcaacgacatcaaaacttcgatggttgaatcggcaaaaagtggacagtcgtttgacgattggcgaaaaggtatcttgaatctgctcagcaacaagggctggctgcatccgaacgggcataacggtaaggatatcatcgacccagccaccggcgaggtattcggttcgccgcggaggttggagacgatttaccgtaccaatatgcaaactgcctacaacgccggtcaatatcaaggatatatggcaaatattgatgcacgaccttattggatgtatgacgcggtaggcgacagccgcacccgtccggcgcattcggcaatagacgggctggtgtaccgctacgacgacccgttttgggcaacgttttacccgcccaacggctacaactgccgctgctcggtcatcgcgctgtcggagcgggatgtggaacgccaggggcggattgttgggcaaagcacggcggacaatctggtcgagacccataaaatctacaacaaaaaaggcgatacttatctgacccttgcctataaagcaccggatggcagtctgtacacgaccgatcgaggatttgattacaacgccggacgaatgaactaccgccccgatttagacaagtacgaccgtgcgttggcgcatcaatttgccaaagcggaaatgggtggtgcggattttaaaaccagctttaaacagcttgaaaaagagttttatgaagtcaagcaacgtttggatattgatggcaagcccgataaagagcagaaaatcaaaatccgaaatgcgctatcaagacagcttaaatttgctgcgggtgtattgagcaaggaaacgcaagaattggcaggtatgacacgagcgacggtgtggctgtctgatgatacgttggttaaacaggtagacagccgtgaggggcagaatttcgatgactcctactatgcttttttgccggatatgctgcaaaaccctgaacatgtcatccgcgacaatcgtgaattgattttcacagctcgctataaaggctcggcattgtgggcagttttaaaatatattaaggaggtggatgagatttatctacagtcgtaccgaatcagtaacgacaaagagattgccaaatttatggcgaagaagaaagtattgaaatagacgttgggcaaggctcgaaatcacttgcacacgctctcggacgccctaacgggcaggctgcggtatcgaggttatcaccgcttttccaacgtctgtacggaataataccatgattgatgtcaaaatagacaatatctttgtcgtcctaaaccaaatcgagcggcttggcaacgggatcgaaaaccgctacctgctgatgcgccgactgtccgaaaccatgcacacggcggtcaagctcaatttccgctacgcaggccgtccgaaatggttgggctaaaataccgcgacggcaagccgctttcggattcgggtcgtctgaaagacagtttttccacactgtcagacaacgatacagcccttgtcggtacgaatatcgtctatgccgccatccacaacttcggcggtatggcggggcgcaaccgcaaagttcggattccgcaacgggaatttttgacgctgacggacgacgacaaacaggctttgatggacgatgtgcaggattatttttcgggtctgataccgtgaatttataaaaccctcaaaaacgcgctttttagcgcgtttttttatgcgggtaatacaaacccctgcccaagatataaaaatcaatcctagacgcttctaaaaagcccctgaaaacgattaattgtgtatcgcgcggacaggttttaaaaaaatggcgggagggtttgaagcacgcctactctttgttgttttttcaaataggcaaaatgaccgtattgagagaggtacacatgtccaaaaatgcacaaaaaaccctacttgccgtgtgcagtttcgaggtgcagccaaaagacgggcgaatccaactgctgccatatggcgaatttcgcgcagtagacggtcgtccgactgatgtccctgcgtggtatctgaccgaagaaaacggtcatgatgtcgcgttgttggccaacagctcgcgcaatcagttggttgtcgattatgaacaccagacgctctacaaagagaaaaacggacaacctgcacctgccgccggttggatgcgttggctggagttcacgcctaaaggcatgtttgccgaagtggagtggacggacaaggcggctgcggcaattgccgcaaaagagtatcgctacatctctgctgtgttttcctatgacacaaagggatatgtaagcaaaatttttcacgccgcgctgacaaatttccccgcgttggacggtatggacgaggtgctggcggcagcgtcggcgcaaattttaaaaccggaaacggagcaaaaccctatgaaagagttgttacagcaactgttcgacctgcctgatgcgggcgaagaagaactgaaggcggcattgtccgcgctcgtggaagccaagccgaaagacgtggcattgtctgccgacgtgttcgcgcagctggcggaaaaagacagccgcatcgcggcattgacggcgcaaaccgccaagcctgatttgactaaatacgcgcctatctcagtggttcaagagctgcaaagcaaagtcgccgcgctgactgccaagcaggaagcagacaaaggcaacgaattgattaccgccgcgctgacttcaggcaaattgctgcctgctcagaaggagtgggcaaaaggcgtattgaaacagccgggcggcttggcatttttgaccggctttattgaaaacgcccagccggtcgctgcactggcaggctcgcaaacgggcggcaaagcacccgacgaacgcgtcgccgcactgactgcggaagaggcagccgcagcaaaaatgctgggcatgtccggcgaagaatttgtaaaaatcaaagaaagcgaaggtaagtaatggacaaatcagcgattttgaccgcaatcacggcagcattccgcaaagaatttcaaacggccttggattcggatttcaagtgcaacactaaggtaccagtggttggaacagattcaagaataaaacacttggcgtttcgtagccaagtgtttttcttggtcggtggttcaactcatcttgaaccctgcgtatctcccgatcactgatgttacggaaatcggtttgtttggggaagtattgccggatgagtccgttggtgttctcattcagccctttctcccaagaatggtaaggacgacaaaaataagtctccgctttcaatgctttggttattttggtgtgttggtagaactctttgccgttatccatggtaatggtgtgcaccctgtctttatgtgcctttaatgccctaacagctgcccgggcagtgtcttcggctttgaggctatccaatttgcagatgatggtgtagcgggtaacgcgttcgaccaaggtcaataatgcgcttttctgtcctttgccgacaatggtgtcggcttcccaatcgccgatacgggatttctggtcgacgatagcgggtcggttttctatgccgacacggttgggtactttgcctctggtccatgtgctgccgtagcgtttgcggtagggtttgctgcatattctgagatgttgccacaacgtgctgccgttgcttttgtcttggcgaaggtagcggtaaatggtgctgtggtggagcgtgatctggtggtgtttgcacaggtaggcgcatacttgttcgggactgagtttgcggcggataagggggtcgatgtgctgaatcagctgcgaatcgagcttatagggttgtcgcttacgctgtttgatagtccggctttgccgctgggctttttcggcgctgtattgctgcccttgggtgcggtgccgtctgatttcgcggctgatggtgcttttgtggcggttcagctgtttggcgatttcggtgacggtgcagtggcgggacaggtattggatgtggtatcgttcgccttgggtcagttgcgtgtagctcatggcaatctttcttgcaggaaaggccgtatgctaccgcatactggcctttttctgttagggaaagttgcacttcaaatgcgaatccgccgccgtctgaaacaaggagtcatcatggcaaaaaccaacaacaaaccagaaaccgccgaaaccgccgccccgtcgtttgaagacatcaaagccgaattggacgccgtgcaggcagagcttgccgccgcccgaaacgatgtcgaaatgctgaccacagccttggaaaaagccgaagacgacaaaaaggcactgtccgccgaacttgccgaactcaaagtgcagcatacgcaacgtgccgccgacgctttggcggacagccgcgatgtgatgctcgtcagtaccggcgcagacggcaaagaattttggcgcggcggcctgctgtttgacggcggctggcgcgaagtgaagcgcgccgaagtcggcgaagcggtgtggaaggcaatctgcgccgagcctatgctgcaacgcaaggcggtcgagtaatggcatacgcgacggttgaggatatggttgcgcgtttcggtgagctggaagtcttgcagctcaccgaccgcaacaacgaggggctgattgaccgcgaggtcgcacaaaccgcgctggtggacgccactgccgaaatcgacgcgtatctggggcggttcagacgaccttttgaggatctgccgcccatcttggtgcgcctttgctgcgacattgcccgctaccgtctgacggcggctcagggcgtgttgattaccgacgaaatccgcaaccgctacaaaatcgacgtgctcgacctgctgcgtgctatggccaaaggcgaagtgcagctgggcgtggatgatagcggcgaagaagtggccgcgggcgaagacggtattgtgtttgtaaacggtaaaaataaggtgttcgggcgtgatcactgatattgagcaagcgataacagaccgtctgaaacggggcttgggtcgcatggtgcgcacggttaaaagctacaacggcgaggccgacgatttggcggggcaaatccatacgctgcctgcggtttgggtaacgtatggcggcagcaaagttgagcctgccagcaccggcggcgtatgcggacgttatcaggataccgccgaatttgtggtgatggtggcggcccgcaatctgcgcaacgagcaggcgcagcggcaaggcggcatcgacagccgcgaaatcggcagcaacgatttaatccgcgctgttcgccgcctgcttgacggccagcggctcggttttgccgatagccgcggcttggtgcccaaagcggtgcgcgcgattgccaatcatgtgctggtgcaaaacgccgcagtaagcatatatgcggttgagtatgccatccgctttaacacctgcgggttggaaaatgaccgctaccccgaacgcaccgacaatcccgacgaccccaaccatatctttaccaagtatcagggtacattgagcgagccgtggcctgatttcgaggggttggacggcaaaatttacgacccgcaatccgccgatgaaatacctgtaaacctaacccttaaggataagcaatgagcaaaatcaaagtaacggcggcagatggcctgcgtgtgccgaccgaacacaacccgcacgaatatatcggccaagagccggtggaggtggacggcaacagcctgtattaccgccgcatgattgatgacggcgatttggtggtggttgaggatgccgccccaaataccaaaacccgcaatactaagggagagtaatgatgccccatattgattttgacacgattccgggcagcatccgcgtgcccgggcagtatattgaatttaacacccgcaatgccgtacaaggtttgccgcaaaatccgcaaaaggtattgatggttgcacccatgctgaccgcgggcatacagcccgccttagagccggtgcaactatttagcgatgccgaggcggccgatttgttcggacaaggctcgctggcgcatttgatggtgcgccaagcatttgccaacaacccttatttggatttgaccgttatcggtattgccgaccacagcgcaggcgtgcaggcaaccgcaaccgttaccctttccggcacggccaccgcgccgggcgtggtggaaatcacgattggcggcaagcaggtaagcacggccgttaacaccggcgagaccgccgccacagtggcagaccgtctgaaaaccgccatcactgccgccgatgtaaccgttaccgcatccggcagcggcgcagccgttacgctgacggccaaacacaaaggcgagatcggcaacgagagcggcttaaccgtgagcaccggcaataccggcctaacttatcaagccaatgcctttaccggcggtgccaaaaatgcggacattgccacggccttgtccaaagtggcgggcaagcattatcacattatttgcagcccgtttagcgatgacgccaacgccaaagccttgagcaaccatattaccaacgtatccaacgccatcgagcagcgcggctgtatcggcgtattgggtatgagtgcggccttgagcacggccaccaccgctaccggcgaaatcaacgacggccgcatgacctgtgcttggtacaaaggtgcggtagagccaaacggcatcatcgccgcaggttatgcggcggtgttggcctttgaagaagaccctgccaagccgctgaacacgctggaaatcaaagggctggccgttacacctgatgcgcaatggccgctgtttgcagaatgcaacaatgcgctgtacaacggcttgaccccgctcacagtggtcaacaaccgcgtgcagattatgcgtgccgtatccacctataccaagtcggccaacaacaccgacgacccggcactactcgacattaccaccatccgcacgctggattatgtgcgccgcagcgttaaagagcgcattgccctgcgttttccgcgcgacaaattgagcgaccgcctgctgcccaaggttaagagcgagattttggacgtgctgattaagctcgaccaagccgaaatcatcgaaaacgccgaggccaacaaaggcaagctggtggtggcgcgtgcgcaaaacgaccccaaccgtgttaatgccattatccccgccgatgtggtcaacggcctgcacgtctttgccgggcgcattgatttgattttgtaacccttttcagacggcgtttaaaacaggtttaaaggccgtctgaaaccttaaaaaaggataaagcatgagcgacgctacctatgccgacgcggtgattatggagatgaacggccgcgatatcgagattgtgagcatcaagccgcaaaccactacaggccgcaagccggtcaaaacgatgaaccgcaacggccgagtcaacggttattgtgacggcgtaaccgaacacaaattaagcgttaccgccgccattccgatcgacggtacggaaatcgactgggacaacatcaccaaggcgaaaatcacgatttaccccatcaacgacgaagatcgccgcacttcctacctcgactgctttaccgtcgataccggcgagcaatatgaagtcgataacgaggcacgcatcgacattgagatgattgctttgcacaaaatcaaggagtaatgcgtgattaccgtcaaactgacccacgggctgacctacaatggcaaagtcgtatctgaattacgcctcaagccactgaccgtcggcggcgaactggcggcgttcgccctgattgatgacttgcccgagctgcccgaaaacgccacaaaagccgaactgctgcaacgcgacgtcctagagacgctgacctactggtcgcagcagattgaagcccaaggtatcccatccgacatcctgacggcgcagtggctgatggaaaacctctctaccgaagactaccataccgtgatggcggctcaggaggatttgcgcctaaaaccgtccgccgctacggcgagccccgatgcgccgtcggcggcggagcagtaaaacgcagctacctgacggcacacaaaagctaccgtcaggcggtcatcctgatggcaaggcggggataggggcggacgcagtgcgcgatatgtgccacgccgagctgtcggcatggtttgaagacatcctgtcgagcctgggcataaaaacgccgaaggaagagggagtgattgtgtcgaaacggctgagaaagccggagggaaaataaaaaggtcgtctgagtttcagacgaccttttttttatttgacggttagggttgttttctgccgattattgcaatggtgtttgtttctttttcaaaaacaacgctatataaaataccatctgccggaacgtctttttgcgctgttgctcctgtctgattggattctttgacgacttcggttaaagctgtaaaaagttgttttcctgcttccgattcgcccaatttgtctgtggtagttaaagacagaactgcctgaatactgtgtaatccatttatggcattattgactagattttgtcctttctctccgtcggtttttaaaatgtagcctactgagatagctctaattttttgctgctcgtccagtttgagcgcaatcgccccaaaatccattaccaaagtaaggtcataaccacaatcggtcttgacaatatttttattatggatttttgttgagacgttctgagttttaaatgcttgctccaaattgatgagatattgttcaactgtgatgtccattggggcggtacaatcagcagcctggatactttggacaggttcttcggcttgtgccgtttttgattgttggttgcaggctgataaaacaattgaaacacaaattgcggaaatcaattttttcatattcataaaatatccctttgaataaaatggttatcattctagtattataacgcaacaaacaaataaagcacgaaaacggggttgaagcccataccgcctcccttaaacagcctttaaacgataattgaccttgagttaatacgtttaaaggctgctttttatggcaaacgggaacatgaaactgtcgttggtgttaaccgcccgagatgacggagcgagacggctactggctgatactcaacgacaattagatcgtaccgcgaaatcgcgggcgcaacttgaacggcaaagccatacttatgcgttgaccggcatccgctcagaaaaacagattcaacgcgaaatcatgctgacacaggctgcgtttaaccgtttggcgcgcagcggcaaggcatcacaaaatgatttggcacgggcggcggtcgctacgcgtaaccgaattcgcgagctgaacgcggaactgaaacagggcacgggatttgcggacaagatgggaaaaatcggaagattcggtgcagctgcggtggctggtggcgcggcagcgtatacggtgcttaagcctgctatggacaacagaaagcagcttgatgagaacatcaaccgcgtgtccagacaggcatttattgaggataacagtaaatcggcagcgtggattgcaactgaaggtgcgcaacagatcaaggatttggcacttgaacttgtcgagaaaaatggcgggacccacgataaggctttggatttaatcagcggcatgatgaccaccggtctgaattttgcccaaaccaagaatgaagcgcaggcggcatatgcttttgcacttgcctcagaaggcagtggcgaggatacggcaaaactgattaaaaccctgaaagatggcggcatgagcggtaaagacctgcaactcgggcttgagcacgtcttgcaatcgggtttagacggcactttcgaggtgcgggatatggttcgggagctgccgagcctgctctctgccgcgcaacaggcagggatgaatggtgtcggcggtttggactacctgctctcactcttacaatctgcggcgaataaatcgggcagtcctgccgaagcggcgactaatgtgcaaaatcttttgagtaaaactctgtcgcctgacacgataggtcgtctgaagaagatggcaaatccgaatgacccgaagaaaggtgtcgattggataggctcggttgtgcaaggcaagcaaaacggcgaaaacgcagtgcaggtgttgtcccgtcttgccgatgccatgctagtaaaggataagcaataccaagattataagaaacgcgcggctgcaggcgataagacggcggcggagcaggcaaatatgcttaagggcgcgcttttggcgcaactgctgcctgatttgcaggcaaaacaaggtttgctggctgcaacggatatgacgcaaatccgtgaatatatggcttcgttggctggcgtaacgttggataacggaaaaattgctaagaacaacgaggcgcgaatgttgtcggcagcggcgcaacaagagcaacaggaatcgctggcaatgttgcgggaaagtctgacgggaacattggtggatatggaaacctcgtttaaaaagctggcagcggaataccctaatgccactctagccctgcaagcattgacgacggcggcaacagcggcgtctgccgcaatgttattaaccgccggtggcggtaaaggtgcaggctttctgaaagatgtaggtagtaaagcgttgggatggggtaaggcttccgcaggcggcgtggcagcaggtgccacagcggcaggcggtaagttgctgtcatggggaaaatctgccggtagcgggctcatgaataatccagcgttagttaaacgggcgggtttgttaggtatgttgctgtattccgagtctttgggtgacggcacattgccaaagggtttgcgtggtaccaagacaactcctgaaatgattaatcgtctgaaaaacaacggtatccgatttgaacctgcgccgaagcgggaacaggcgcggggtggtgtccctcagtatttggctgctccgtcagcgcagcctaccgataagatgttgtctccgttgttttcaactcagacggcggcgtatcaggcagccattcagcagcagacggcggcgtatcaggcagcattggcgcaggatacggctgcagttacaacaggtttggcacaagtgcaaagtgcgatggcgtcggcaagtcagaccatcaataccaatgtgagcctgaatatcgacggacgtgttatcgcgaatgaggtatcgcggtatcaagtggccatgttcggccgtggagcgggtcaataatgagcggatggcataccttattgcaggacgcatcttacaagggcgtcggctttgatattgaggtggtggacgagagcaacggcaaggcattggccgagcatgcgcggccgtttgtgcagggtatcgaccttgaagacatgggcatgaccgggcggcaggtgcagattaatgcggtgttttggggcaagggctatgcaggccgtctgaaaaagctgctggatgcgctggagcagccgggcggcggcgtgctggtgcaccctgtttgggggcggatgcacaacatgattgcggcatcatggagttaccgacatgaggccgattatgtggattatgcgggcatcgatattactttccgcgaggcggccgaagcgcaggaaatctttgtttttgaaaacgcctttttggtcgagcttgaggcgttgattgctaatatcgacacctaccgcgaggcggctatcggctttgttgatgcggtgttggcggtggatgcgggcgtatcagctttatggggcagcgcgctgggcatttggagtgcggcatcgggtacgtttggcgcggtgcgccgtttgtttgatttggacaaaattgcctttcccgatcggggcggatacagtgcagcggcgtttaaaaacggctcggccaagctgtttgcggatatatcggtcatggtagatactggcatacgccgtgaggcgggtttggccgataatgccatgcaccatgccggttggtcgccgcgacagcggtttgacggggctgcggctgttgccgaccgcgccgccgctatccctgataatttgctgaccggccgcttttcagacggcctgcaaaaccgcctgaaccggttaaccgccaaacaggtgcagccggtagcgcaggcggtgcgcctgttatccacgtcatcgctgttgtcggtggcaacggcattaatcgaggcgcatggcgaagagatgaccgcgcccgatttgattgaggttaaccgcgccatgcgccgccgtatgcaggccgagattgccgccttgcgggcggtgcagacggctgctgccgagtctggtgggctgacggccaacgccgtgtataccgaggcttaccaaacggcagaatccctgcgcgcggcggcaggccgtctgaatgcgttggttgcggcggtcatcaaccaaaagccgccgctgattgtgcgccaagccccaatcgacggtacgatacaccaaatcgcccacgagttttacggcgatatagcccgcgcagcagagctggtgcggctcaatccccatatccaccaccccgcgtttatcaagcgcggcactttggtcaacagctatgcaaaataattcatacggctatgccgtgtcggtgcgcgtgggcggtaaagagcaccgccactgggagcgctacgacatcgacagcgactttttaatccctgccgacagcttcgattttgtcatcggcaggttgggaccggaggcggccatacccgatttaagcggagagagctgcgaggtagtgatagacgggcaaatcgtgatgacgggcatcatcggcagccagcgccacggcaaaagcaagggcagccgcgagttgagcttgagcgggcgtgatttggccggttttttggtggattgctccgcgccgcagctcaatgtaaagggcatgacggtattggatgcagccaaaaagctggccgcgccgtggccgcagattaaagcggtggtgcttaaggccgaaaacaaccccgctttgggcaaaatcgacatcgagccgggcgaaaccgtatggcaggcattaacccatattgccaactcggtcgggctgcatccgtggctggagccggacggcacgttggtggtgggcggtgcggattacagcagcccgccggtggcgacattgtgttggagccgcaccgacagccgctgcaatatcgagcgcatggacattgagtgggataccgacaaccgcttttccgaggttacttttttggcgcaatcgcacggccgcagcggcgacagcgccaaacacgatttaaagtgggtgtacaaagacccgacgatgacgctgcaccgccctaaaacggtggtggtgtccgatgccgacaatttggccgcattgcaaaagcaggctaaaaagcagctggccgactggcggctggagggatttacactcacgataaccgtgggcggccataaaacccgcgacggcgtattgtggcaacctggcctgcgtgtgcatgtgatcgacgacgagcacggtatcgatgcggtgttttttctgatggggcggcggtttatgctatcccgcatggatggtacgcaaaccgagctgcggctcaaagaggacggtatttggacacccgacgcttaccccaaaaaggccgaggcggcgcgcaagcgcaaaggcaaacgcaaaggcgtgagccataagggcaaaaaaggcggcaaaaaacaagcagaaacggcggtgtttgaatgagtttgagtaaattggcgaaaaaaacggcacaaactgctaaaaatatcggcgaaaccctgcgcgcggcctttcggggaaaaatcacgctggtggtgtcgtccgagccgatacagcgcgtgcagttgagcggcttggccgacgaaaccctgcaagaccttgaacatttgcaggaatacggctttgccagccatccgcccgacggcagcgaagcggtagtgataccgctgggcggcaatacttcgcacggtgtgattgtgtgcagccagcacggcagctaccgcatcaaaaaccttaagcccggcgagacggcgatttttaatcatgagggtgcaaaaatcgtgattaagcaaggcaaaatcattgaggccgattgcgacgtgtaccgggttaactgcaaacaatacgaggttaatgcggccacggatgccaaatttaacgctccgttggtggagaccagtgcagtgttgacggcgcaaggccaaatcaacggcaacggcggcatggccgtcgagggcggcgacggagccacctttagcggcgatgttaaccaaacgggcggcagctttaacaccgacggcgacgtggtggccggcaatatatcgttgcgccagcacccgcataccgacagcatcggcggcaaaaccttaccggcggaaccggcatagacaagcagacctttggcagccttcgggctgctttttttgtgcgtgtgggattgaagcccgtgtactccgtgaggccgtctgaaaacggcaaaatgccaacatggacaaagagctaaaccccagcatcggcgactataccggccgcaccgtcgatacgctgcaaaatgccgtgtatatccgcttgatgacaccgttgggcagctggtgggcggataaaacgctcggctcgctgctgcatttgttgcagcgcgaaaaagacctgcaacgggtcagcctgttggccgagcaatatgccgatgaggcactgcaaccgattgttaagagcgggcgtgccgacaagattaccgtgcgcgcagagcagccgcacgacggccgcctgatcctgcatatccggatggatacggcggcgggcgggtttgattaccgccacgaagtgcccgtgatttaaagaggttttaaacgtgtttgaaacgccgacatttgagcaaatccgcgagcgtatcctgcgcgataccaaaagcctgtggccggatgccgatatcagccccgacagcgaccattatgtgcacgccagccgtttggccagctgcgccgaagggcaatatgcgcatcaaagctggattgtgcggcagattttccctgataccgccgaccgcgagtatttggagcggcatgcctccatgcgcggcttgagccgccgcaatcctaccacggccagcggcacgctgaccgtaagcggtattgcgcaatccatgctttcagacgacctgcaagtgcgtatcggccagcgtttttaccgcactaccgcccgcgccgttatcggcagcggcggcacggcggaaataccggcaatcgccgacgagccgggcgcggccgccaatgtggcgacggcgaggcgcaactgatggccgcccccgccggtgtggccaccgaatgccgccttaccgtacaaggcggcaccgaccgagaaagcgatgcctcactgctggcgcgtctgttggaaatcatccgccgaccgcccgcaggcggcaaccgttacgactataaaaactgggcgttgagtgttgacggcgtaaccagcgcatatgtttatccgctgcgccgcggcttgggtacggtggatattgccattacctccgccgacggtgtgtcgtcggaagaaactgtgcgccgcgtacaggcttatatcgacgagatgcgcccggtaacggcaaaaaatgcgctggtactcaagccaaccgtaacggcggtgcctgttaccgtgcaagtcaagctcgacggtatcgacttggacgaggccaagcgccgcatacggacggccctaaaagaatatttcgacaccctgatccccggcgacggcctgactgtgtcgcaaatcgaggctgctatcagcaatgtggatggtgtgatcgaccgccgtctgactgcgccgacggccaaccgtgccgccgatacggttaaccgcatcgagtggtttaaagcgggcgcgattaatgtaacggagatgccgtcatgagctatcaagacatcttgcggggcctgttgccccccgtgtcgtatgcccgcaatgccccgcgtgtgcgggcgcaggcagaaatagacggcgcagcgctggatgcggtggcggaatcggctcaaagcgttgccgatgccgtcgacccgcgcagcgccggccaaatgctggccgattgggagcgcgtattaggtttggacggtacgggcaaaaaccgccagcaccgtgtgttggccgtcatggccaagctaaacgaaacaggcggcttgagtattccttattttgtgcgtttggccgaggcggcgggctatcaaatccaaatcgacgaaccgcagccgttccgcgccggtgtaaaccgcgccggcgaccgtcttgcgccgcaggaaatcatgtgggtgtggcacgttaacgtgcgcggcggcaacaaccgcattacccgattccgcgccggtatctcggcggcgggcgacaggctgaccgattacagcgatgccgtgatcgagagcctgttcaaccgcctcaagcccgcccacaccgctatccgatttacctaccgctaaaggacgatttatgcaccccatcgaaacccccgataagaccttccacgacggcgacggcgtgtccgaattgggcaccatcctgcccgcgtggtggctcaaccaagtgcaatccgagctgctggccgtgctgactgcggccggtatccagccggataagtcgcagcctaatcaattactggcagcactaaataggctggctgtagttatcaccggcgaccaaaccgtcaacggccaaaaaacctttaccgcccaaacccaattccaaagcggcatccatttatccgccaaccagacgaactggaacggcggccacaaagcctacatcggcgcggatgccgacaacgcccacatcgtcttcggcgacgacaccctccgcctgcacggcgcaaacaaccgcatttcctacaacaaccacgacatcttccacaaagccaacaaaccgcgttttgccgaagacatccaaggcaaaccgaacacactgtccggatacggcatcggcaatttcaaagtcgaaacattccggggcgatttgaacaccctcaaaacagacggcatctattccctgccgacggcggtcggcagctccaacctgcccgttgaaaacaccgcctgccatatccaagtcatcgccggcacgaaacacggctggtgcaggcagttgggttatcccgcctacacgtccgacgtgtacgaacgccaccaaacgagcagcgcaaacgacaactggtccgcatggaaaaaactcaattcggacggcatccccgtcggcgcgatcgtatcctttcccaaagccgtacaaaaccccgcaggctatctcaaagccaacggcacgacctttgcacaaaacaccttccccgacctttaccgcgccttgggcaacagcaaccgcctgcccgatttaagccgtaccgacatcggcatcaccgcgtggtttccgtccgaccaaatcccgaccggctggctggcgtttgacgacatccgcacgcgcgtaaccgaaaccgcttatcccgagctgtaccgtctgctgaccggaaaatacggcagcatccaaaacgtcccgcaggcggaagaccgctttatccgcaacgcgggcaacagcttggcagtcggaacgaagcaggaagacgaaatcaaacggcacgtccacaaagtattttcacactggacaaaccacacagacgcggcagccctcggttacgaagaccgcaacgaaaggcagagaagcgcgctcgtatcgacttggacggacgaaaatttaaacgacaacggctttttaaccccgcgctcggacagcaaaatggcgacaggcggcgacgaaaaccgccccaaagccctggttttaaaactgtgcatcaaagccgccgacaccttgggcgaagccgtgttttggataaagtcccacggcgaaaccatcaacgcaggcgcgctggacgcgggcacgctggcgcaaggtttgcaagacaaagccgaccgagaccacacccacaccgccgcccaaatccaagggctggacgaaaaaatcagcaccgccgttgccgcgcaattcacacgccaaaccatcggcggcgtggatattgtcagattccccgacggcacaatgatacagaccggcagctacaggttcacacgaagcggcggccccatcgaaaacgaagtcgtcttccccgtcgcctttgccgacggcaacgtcaaatgcttcgtatccgaacgccattcggaacgcgttaccggcgatcgaaggcaacacaactggctgtttatccgcgcaaaaaaccacgccgccgccattatcaccaactggtacgaaggcagttgcgactggatggccatcggcaaagccgcctcgggaaacgccgccagctccccgataggccccgaaatacctgaaaccaacgaagaaccgcaaagagagagtggaagaacatcaaccggaccccgaaaccgccgccgccgagacggcttgctcgaggcactgcaagactagcgggctgtagagatggctgtagagacgggctgtagagatggctgtagagacgggttgtagagacgggttgtagagacgggttgtagagatgggttgtagagatggctgtagagatggctgtagagatggctgtagagatggctgtagagatgggctgtagagatgggttgtagagatgggctgtagagatgggctgtagagatgggctgtagagatgggctgtagagatgggctgtagagatgggctgtagagatgggctgtagagatgggctgtagagatgggctgtagagatggctgtagagatggctgtagagatggctgtagagatgggttgtagagatgggttgtagagacgagttgtagagatgggcttcagcccgccgatccaagcaatccgaccgaaaccggccgcgccgccaatcccccgaaacctatgccccgccaatcctgccactcttcgtcattcccgccgctttcgtcattcccgcgaaagcgggaatccagaccccccgacgcaacaggaatctatcggaaaaaccgaaacccccgccaccgtcactcccgcgaaagcgggaatccagcccccaaacgcggcaggaatctatcagaaaaaacagaaacccccgccgccgtcattcccgcgcaggcgggaatccagaccccaaacgcggcaggaatctatcggaaaaaacagaaatccccgccgccgtcattcccgcgcaggcgggaatccagaccccaaacgcggcaggaatctatcggaaaaaaccgaccccccgccaccgtcattcccgcgcaggcgggaatccagaccccaaacgcggcaggaatctatcggaaacggctgaaaccgaacggactggattcccgcctgcgcgggaatgacggcggcaggggtttcgggattcccgccttcgcgggaatgacggaaagtggcgggaataacgaaaggcgggaatgaccgcgcaaaaagccgctgcccccttcggacggcaccggcaacaaaaaaccgcacggccgaaaccgcgcgggaaaggatagtcgggcgcgcccgataagcagcggccgcccccgttatttcaattgggcgatatattggcgcaaaacctcgttgatgcgcgtctgccagcccttgccgccggcgcggaatttttcgaccacatcggcggacaggcgtatggtaacgagttgtttcggggttttgcctgtgtttcgtttttgcattacgcccttttcttccaattgtttttgatgggaaaaaagcacctgtgccaagtcttcgggcagggcttcggcaatggggcgggcaagcgcaaaatcttcggcggcaagttcccgcacttcgccgtcagcgtttgttaaggattgacgttgcatattttttaacctctcttttattcgctttgcgaaaactgatgacacggatgccgtcttttatcggcgtaaaacagacaatgtgcaggcgttgcgtatcgcctagataagcagcggcaacataacgcggttcggggtaatcaaagcggacatcgggcacaataacggccgttgtccagcgtatttgcccgactgattcaaagggcaaattccgctcttcgatattgcgttgatttttttcggagtcaaattcaatcttcattgcagcttgcagcgtattttgtcgttacattataagcggcaaaaaaccaaaatgtaaatacaaaaaaggaaaccccaaaatgaccatctatttcaaaaacggcttttacgacgacacattgggcggcatccccgaaggcgcggttgccgtccgcgccgaagaatacgccgcccttttggcaggacaggcgcagggcgggcagattgccgcagattccgacggccgccccgttttaaccccgccgcgcccgtccgattaccacgaatgggacggcaaaaaatggaaaatcagcaaagccgccgccgccgcccgtttcgccaaacaaaaaaccgccttggcattccgcctcgcggaaaaggcggacgaactcaaaaacagcctcttggcgggctatccccaagtggaaatcgacagcttttacaggcaggaaaaagaagccctcgcgcggcaggcggacaacaacgccccgaccccgatgctggcgcaaatcgccgccgcaaggggcgtggaattggacgttttgattgaaaaagttatcgaaaaatccgcccgcctggctgttgccgccggcgcgattatcggaaagcgtcagcagctcgaagacaaattgaacaccatcgaaaccgcgcccggattggacgcgctggaaaaggaaatcgaagaatggacgctaaacatcggctgaaaaaatacgtttaccacctgttggtagccatcgaccaactgttcaacgccctaaccggcggcgcggcggacgaaaccctctcaagccgcacctatcgccgcgcgcggctcgcccaaaagcccaaaacccgctggaagattttatataccctgatcaacggcgtgtttttcgaccgccaccactgccggcaggcgtatatcagcgaactgaaaggcaggcagcacgacgcgcggttcaaccaaagccgcgccgccggggaaaaggggacgcgatgaactacttcggcatggtagagtttctgcgcctgatggcaatggtgcggccgccatttgtcttcttctccggcacccgcagcgaactgcctgcttatcttgacctcgtggcagaactgcgcctgaccggatgggagcgttttgcaggcagccaaaccttgactgtgagcagcacatcaacagcaattcaagctacgacgaccacctgatttataagttctgaccgcaagtagcgtactacttttaaaggcataagataatccccgtttaacagaccattaaacggggataaatttgtgcaaaagctaatacaatttcctacgcttcggcggtgcaaaagctgccgccaattcgtgcaaaagctgccgccgccttacattccagtgcaatgccgtctgaaacttcgctaatctcgggttgccgcgcgctgtgttgttcttcggtactcagcaaaaagccgtacagacgctccaatcgggcgcggtaggcggtgaatttgttgtagaacatccggaagaaagaaagcgcgttttgcagtcgcgcgaaggcttggacggtctgctggatgtcgccgattttgatttgtccggcaaacaggcgcggcgcttgcaaaataatggggaagagcttgatgccgttggtgaacatatcattaaagccgctcaggcagacgctttgtcgcgcaatacgccagcggttgcggataatggctttaaaacggtcagaaagctggtcgtgttcgtgtttttcgccgctgtaaaacgccacgctttcggcgtggtcgcgcacgcggatgagggaataacggtagtcgccgttgagtttttcgttttcataattgtaacgaatcaaagggttgcctatccacatggcgataaaggtcgccaaaatcacaaatatatagacaaaccaaacgatgccgtgcggaatgtcgaagccgaacacggtcaggatgccagccaagccccgcaaaacaacggcaaattccagagaagtaacgaccgaattgaccatgccgcgcacaaattcgatggtcgaagcgataaattcctgcgcgtcctgttggatacgctggtcgatgttgtccggcgcgtggcggcgcatttgcaggcggtagtagtttttgtcggcaagccagcgtgctgtcagcacttcgttgagccgctccgaccatttaatcgccaagccttgatcgaggaagtcgttgacgacgttgttaaacgcccgtatcagcaccacgcccgcgttcattgcagcaaacatccaaaatgccgaagcatttcaaatcctgcatcgagtcgtaaagccctttggacataaaggtactcaacacattcagccgcatttcggttaacaccagcgtaatcatcgccgtaatcagcagcaagactttgaccgcgcttttcggtgtcagacaaagccaaagcggtgtggaataaagctcggtttgccatttctgcatgggaaatttcttacggtatcaatgccgtctgaaaaagacgggtacagttgattttttgatgaagtttggggaagttttgccggtcagggtacattgcgtgttaatttatagtggattaaatttaaaccagtacagcgttgcttcgccttagctcaaagagaacgattctctaaggtgctgaagcaccaagtgaatcggttccgtactatttgtactgtctgcggcttcgtcgccttgtcctgatttttgttaatccactataccatacaaccacgccggaattaagtttaaatttgaataaaaggttcgggttctgcaaaatacagaacccgaaccttgttcggatattgaaaccggctgcccgattttgggcggtgcggcttgcaagtatcaagattcgcatatgccgtctgaagctcggagaggttcagacggcatatgcttatttgggctgctcttcaacgaatctcggacctttcaagatgccgttgtgagaatagggcgacagcaggttgtatgcggcggttttggaaacctgataaccgcggtcggtcaggctgttggcaatctgattgaccactgcgctgaccaaagcccccaacaggccgctgttgctgttgttgctgccttcgcggatgctggccgaacccgaccacaactcttttccgttgcgggaatcgaccagccgtgctttggcggatacggtcgtcacgctgtctaaaatttgatatgaagtgccgtattcggtaaccgtaatgtacaaaaccgcatcattgccgaaaatctgatgcagtttttccggccggacggcgtgaatatcggcggcattggtcaagccgttttgtttgaaggtttcctccacgactgcggcggggaagacgtaatagccggcttcggaaagcggcgcggcggtcgaagccagtacaccccatgttccgttgacatcgggcgattcgttcagcggcggaaccaccaaaattgaagccggtttgctttccttgaatgacgtgtagtcgaaatcgggcgctttttgaacttggcaggcagacagcgccaacacggcggcaagccctaaaatcaaaggtttcatcgcttgcctcctttaccggttttcatcaggaagtccataaatacgcccgattcgggaaacagccttttctcttcttcaaactggcggaacgcgccctctttgtctcccgctatttaggtgacgcgttagaatactcaagctatgcatcaagcttggtaccgagctcggatccactagtaacggccgccagtgtgctggaattcgcccttccgggctggatgtgttcgggaataccgtttttcagatagccgcgtatgcctgcccagccttggacgaaacgggaaaaacgggcggtatcgctgccccaaatgccccagcagaggcgaaatacgagcaggaaaaggacgaacagcccgacgcgcgtgtgccattgcagcatatcgccgccggctttcgcgctataccacataaagggcagggacgcggcaagcagccagtggaaaaggcgggtggggaggtcccagactttggttttgtttttcataatcggtttccggcggtagaatcggtttgttttcgagccttattttaaccgattggaggggcaatgtttcccgtttttcatctttcaggcgagagccgccgccagatgcttcagacggcattgcgttttccccatgttttcaaagcccgtgcggaagattcgcacaaagggactttcggcacgctcgccgtagtcggcggatcggcagggatgagcggcgcgcccgtattggcggcatcggcggcaatgtatctcggctgcggcaaagtgtgggcgggtttcaatcaggatacgctaccttttgccgttattgccggttttcccgagattatgctggatacggcggacagtttggccaaacgtcaagatataaacgcctgggttgtcggttgtggattgggtacaggtagggcggcggtcggaacgcttgccggaattttgacggaacacacggacaagcccgtcgttttggatgcggatgcgctgaacatattatcaaccgatgccgaaacccgaaatctggcgcgcgggtgtaaaaacctgattttaacgccacaccccgccgaagccgcgcgcctgcttggaacgacggttgcgcaggttcaggcggatcggacggcggcagtgaggaagataggggcaattttcggcgcaaccgtggttttaaaggggcacaaaacattggttgcctcacccgatacggaaatctatgtcaacgaaagcggcaacgcgggattggcaacggcgggcagtggcgacgtattgggcggcatcatcggcagtctgctcgcacagggcgtgccggtttttgaagccgcctgcgcgggcgcgtggctgcacggcgcggcggcggatgtcataaaagaatcggcaggcattgcggcagggctgttggcaggggaaatcgctccggcggcaaggtggctgcgcaaccggataactaaaagtatgtaagaagatatagtggattaacaaaaaccagtacatcgttgcctcgccttagctcaaagagaacgattctctaaggtgctgaagcaccaagtgaatcggttccgtactatttgtactgtctgcggcttcgtcgccttgtcctgatttttgttaatccactataccatacaaccacgccggaattaagtttaaatttgaataaaaggttcgggttctgcaaaatacagaacccgaaccttgttcggatattgaaaccggctgcccgattttgggcggtgcggcttgcaagtatcaagattcgcatatgccgtctgaagctcggagaggttcagacggcatatgcttatttgggctgctcttcaacgaatctcggacctttcaagatgccgttgtgagaatagggcgacagcaggttgtatgcggcggttttggaaacctgataaccgcggtcggtcaggctgttggcaatctgattgaccactgcgctgaccaaagcccccaacaggccgctgttgctgttgttgctgccttcgcggatgctggccgaacccgaccacaactcttttccgttgcgggaatcgaccagccgtgctttggcggatacggtcgtcacgctgtctaaaatttgatatgaagtgccgtattcggtaaccgtaatgtacaaaaccgcatcattgccgaaaatctgatgcagtttttccggccggacggcgtgaatatcggcggcattggtcaagccgttttgtttgaaggtttcctccacgactgcggcggggaagacgtaatagccggcttcggaaagcggcgcggcggtcgaagccagtacaccccatgttccgttgacatcgggcgattcgttcagcggcggaaccaccaaaattgaagccggtttgctttccttgaatgacgtgtagtcgaaatcgggcgctttttgaacttggcaggcagacagcgccaacacggcggcaagccctaaaatcaaaggtttcatcgcttgcctcctttaccggttttcatcaggaagtccataaatacgcccgattcgggaaacagccttttctcttcttcaaactggcggaacgcgccctctttgtctcccgaacgggaaagcagcagtcccagatgggcgtgcgcacccggggcggcattcatttttttgttgccggcttccacaaagtatttttccatcttttcggtctgcttgcccaacgaagtgtcgtcgtttttcaaaccttcatagacggtatcgggatagccgccgtaataatacagggatttttgcccgttgccgccgcaggcggtcagagccaagaccgccgcacacagcgacaaacggctcaaggttttcggattcatcatttctccttaacggttgggttgccatgcgccgttgtcaacagcctgaaccaggctgttgacggcttcgcggattgccaagtctaaaactttgccgttcaaagtcgcatcgtagccggaagtgccgccgaaaccgatgatttcacggttggaaagtgcgtattcgcccgcgccctgtgcggaatagacgatttcggaagtattgacgttgacgatattcagagccacttttgcataggcgatttgcgatttgccgcgacccaaaatgccgaagagctgatgatcgccgacatctctgcgtccgaattcggttacatcgccggtaacgacataatctgcgcctttcaggttatgcgctttgccggaaatgccggattcctgttttaatgcgttcaaattggtgcggttcagtacgttgaagcggttggtctgttgcaggtgcgttactagaatggtttttgcctggctgcccaaacggtcttccccgtcggagaaaatgcctttttggaagctggagcggttgtcgaatgttccgacggaaatcggggtacgaacaccgtgatattgcgtattgtaggaggcgactttctctacctcgagactgcgtgaggattcggtcgcacagccggtcagtgaaacggcagcggcggcaaggacaacggcggtggaaacggttttcataaaatttaccctaaggtcaagttaaggaaataacgggttgtcattattgtccttatgtaaatttaagtcaaggtgtttgtctgtgcgggacggatgcgcgcggaaggtacggatatttttcaaacggaatcgcggcgcgggcgggatgcctgccttttccggatttagaggtaaacgatttcgccactccgccctttgctttcggcacttgcccaccagacaaatgcgggcagcacgtccccgtagcttttgcgttcgcttttggcttcgcccggatgggatttgatgcgttgcggggaattgatggggccggggacgaggacgttggcgcgcaggttgccgaagcgttcccattcgtcggcggcgactttgcacaggtagttcaacgcggctttggacgcgccgaagccgccccagtaggctttgggtgtttcgccgtggctttcgccgacgaagatgacggacgcgtcgggcgactgcttcagcagcgggaacagggcgcgggtcagccccataggtgcgacggtgttgatgcggtattggttgacccattcggcgacggtttggaaatccagcggcgagagggcgtaaaaatagccggcgcagtggacgatgccgtccagtttgccttgcgtggcttcggcaatggtggcggcgaaatgttcaaattctttttcttccgcgctaataaggtcaaagcagatggcgaatggttcggggtatccggcttcgacaatcgcgtcatacactttttccagttttttctgatgacgggcaaccaaaatcacggttgcgcctgccgccgcataggctttggcgacctgttcgcccagaccttgcgatgcgccggttactaagatggttttgtcggacagtgtcgccatactttttcctttttggttgtcggttaaggtattttagcgttttgccgcaccttgtaaagcgtcccgatgtcggccggcgttttcagacggcatcgctcaggctttgcaggcaggcttccgccgacgcgaaacctgattgtacggcggcttcgagcgtggcggggtagtccgggtggaggtagtcgccggcggggaagatgcggtgccggtgcaaccacgacaagtccggcggcggggcatcggctgcggttgtggcgcgtttttcggtgatgacgcgcacggcttcgggttcgcccaaatgcggaaggatgcgtttgaggtcggcgtgggctttgtccgcccacgcccggtttgcaaacgcgccgacgcggtcggaaacgctgatgacggcggacacttcgttttcaggcagtccgagcctgccccggcaaagcagccattgcaccgtgccgtcggcaaggccggtcagcggggcgggcaggcggacgggttcggcgtagcgcagatagacggtggtgatggcgtggtagcgaaggttttgatatgccgtctgaacgtgttcgggcgtgccttcgggcaggagcgcggcggcgtggtagggcgcggtggcggggacggcggcatcgaaagcttcgccgttgacgagcactttcccgtccgggagggtgttcagacggcatacgcgcgtttcgaggcggatgtccgcgccgagccgttgaagatccgccaaggcgggttcggcgacgattgcgcccaaatcctgcttgggtaggagatagtcgctgccggattttttcgtcagcacgccgtcggacaaaacgttgcacaacacgcgcaggcttgcggtttccaaaggcgtgttgagcgcgccccaaaccaagggctgccaaaactgcatcacggcggcacgcggcacgttccgctgtttcagccattgcgccactgtcgtgtcgggctgtccgaggcgtgcggacttctgcaaatcggacatatcggcaagcagtttggctttgaatgcagtcggtgcacgccgggcaagcagcacgccgcccaaaatatgcagcggcgcgggcagggggagggcgcggaactgcaaaccgccgtgcatatgccagtgcagcggtacgcgcaaaaaggcggcacggggatccgaaccgatggttttcatcaggcgcaacacgccccggtatgcgccgagcaaaatgtgctgcccgttgtccaaaaaaccgaaaccgtcggtatttccggccagtgtgcgcgccctgccgcccgcctgccggccggcttcaaacagggtaacgtcggcgtgccgcgccaaggtgacggcggcggacagtcctgcccagcctgcgccgatgacggcgattttcgggcgcggatgcggcgtgttcatcatttattcctccaatggttttgcagccgtatctatttccgtttccgaaaatgacggtagaaaaggatacaggctaaaaataaaggcagcagaaagcgcgcatagggataccacggatggtctgcatgccagtatccgtaccgtccctgtggaacggtatcatagcggtaactgtcggggaaaaagttgatccaaaccgttactgccagccataaggctatatccctgactgctttcatttacttctgctcctgtttaaattcccagcaattccatttcaaagcgcgaacgccaacgggattgcgcggttacgatgcagactttcagacgatggttgaaaccccgtccggcggggctgtgggaatcgggtttgcctgacgggcggcgggcggtatgcgccttatgcccgttccggcgtgccggggcgcggtttgaatccgaataaccaggttttcagggcaatgcgttttttgcgcggcgaagggagggcgattttgtatttgaggacgttttgtgcgccgtctcggtcgatttcgttcaatagctcgtaataaaccgccgccatgaccagtccgactttttgggcttttttatcggcatcaggcagcagcgatacggcttcgcggtaggtttcgcgggcgcgtttgatttggaacgccatcaattcggcaaaattgcccgtcgggctgcattgcaaaatcacgcttgcgggtacgtcaaaccgccgcatttcctccatcggcaggtaaatccgccccctgcgcgcgtcttcgccgacatcgcggatgatgttggtcagttgcagcgcaagtcccatcttgtcggcgtattccagcgtttggtcgtctgaaaaccccaaaatccgcgcaatcaggcagccgaccacgcctgcgacgcggtggcaatacagtttcaattcttcaaaactgccgtaacgggcttgaaccaaatccatctgcatcccgtcgattaaggcttccagttcatatttcggcagcttgaaggtttccttaacttgccgcaaggcctgattgacggggtgttccggcatcgcgccgccgaataccttgtccaaatcgccgcgccaccagttcaatgtcgcctgtgcaacatcggggttggaacattcgtcaaccacatcgtccaattcgcggcaaaaagcatataaaaccgttaccgcatcccgtttttcctgagtcaggaaacggaagcccgacaaaaaactggagcggctttcttctgctttttggcggcaatagtcgagtcctttcacgatttatattcctaatgatgggcgggaaaggcggattttatcggcatttggcggtagagggcaatttcggcggcacgacctaatccttagcggtttgctcaactatcggcgcaaattctgttaaaatgccgctttccttcctttacacaccgcaccgacaggcagaatttatggctcttttgcagatttcagaaccgggtatgtccgccgccccgcaccggcaccgtttggcggcaggcatcgatttgggtacgaccaacagcttggtcgccaccgtccgcagcggcagtgccgcctgcctgcccgatgccgaagggcgcgttaccctgccttccgtcgtccgctatctggaaaacggcggcattgaagtcggcaaaaccgccctgtccgcccaaaaaaccgacccgctgaacaccgtcagctccgccaaacgccttatcgggcggacgcttgccgatctgcatcaaaatacgcactacctgccttaccgtttcggcgacaatcaacgcgttatcgaactgcatacgcggcagggggtgaaaacgcctgtcgaagtgtcggcggaaatcctcaaaacccttaaatcgcgcgccgaagaaaccttgggcggcgatttggtcggcgtggtgattaccgtccccgcctatttcgacgatgcccaacgccaggccaccaaagatgccgcgcgtctggcgggtttgaacgtattgcgcctgctcaacgaacccaccgccgccgcaatcgcctacgggctggacaacgcctcggaaggcacgtttgtcgtgtacgacttagggggcggcacattcgacgtatccgtattgcaactgaccaaaggactgtttgaagtcaaagccaccggcggcaacagcgcgttgggcggcgacgatttcgaccaccgcctgttctgccgcctgctcgaacaaaacggactctcccaactcaacgaacaagacagccaactcctgctctcgctcgtccgcgccgccaaagaacaattaaccacgcaaaccgaagcgcgcattcaggcgacgctttcagacggcatggcaatcgacacaagcatcagtcgcgccgagttccacaacctgacgcagcatttggtgatgaaaacgctcgaaccggtcacacaggcgttgaaagatgccggtgtcggtaaaaacgaagtcaaaggcgtgattatggtcggcggttcgacccgtatgctgcacgtccaacaggcagtcgccaccttcttcggacaaaccccgctgaacaacctcaaccccgacgaagtcgtcgcgctcggcgccgccatacaggcaaacgtcctcgcaggcaacaaaaccgacggcgaatggctgctgctggacgttacgcccttgtcgctcggtttggaaacctacggcggcttggcggaaaaaatcatcccgcgcaattccaccatccccaccgcgcgcgcgcaggactttaccaccttcaaagacggtcagaccgcgatgacgatacacgtcgtacaaggcgaacgcgaactggttgccgactgccgcagccttgccaaattcaccctgcgcggcattccgcctatggcggcgggtgcggcgcgtatccgcgtaaccttccaaatcgatgcggatgggctgctgtccgtttccgcccaagaacaaagcaccggcgtacaggcgcaaatcgaagtcaaaccctcctacggcttggacgacgacaccatcacccaaatgctcaaagacagcatgagcaatgccgccgaagatatggcggcacgcgcccgtgccgaagccgtagtcgaagccgaaagcctgaccgatgccgtcaacgccgccctcgagttggacagcgatttgctggatgccgaagaattgcaacagattcggcaaggcatcgccgatttgcaaggccgtctgaaagacggaaaagccgaagacatccgtgccgccgccgccaaactcggcagcatcaccgacaatttcgccgccaaacgcatgaaccgcaacatccaacgcgcgctgacaggccagagtgtcgataatatttgatacttaaacggtttcagacggcatagaaataatccgatgccgtctgaaggctcgaaaacacttgaaaaacatcgatatggaaaagtcaggcattgtctatctgatgaaaaccgtcatcaagggcgtgtataaaatcggcatttcggatgtaagcaattttgaaggcagaatgcgccatttggaaaacaacggttatgcgaacgttgccggattggaacgcatcctcgccgtcaaaaccgacaattacaaagaaaaagaaaacctgctccatgaaattttcagcaaaagcaggataggcgataccgaattgttcgccgtggacgaaaaccttgtgaaacgtttgtttttatcgcttcgcggcgaaatcgtgttcccgaaaaacgaaacggcggaatcggaatttgaaaaaagcgtccacgaacgcaggcaggaagggaatgccgggtcaggccgcaaacaactgcttgatttggtacggcgcggacaccgggaatacccttacgcgctgccccggcttttggcgggcgcggcattctacaagccgaaaaaatcgaaaatccgcctttttaaagaagcatatttcggcaaaagcggcacgaggctgaccgacgaaattgcagacggcatccatatttacacctgtttttcgcgggcggatttggaaaaagcctattccgaatatttggaacttttcaaatccgaatcggatgccgaaggcagaaagccgcagtaaggtgcaaacagataccgtacacgttgaggagcagatatgatgggcgattccgtcatttattatgtagaacaggcagacgaaccggtaaaccgtgccgacgaacgcgcccgtaaaacattcaaatatttttggcgcgagcttttttgggaacgccgccgcattatttccgccttggattttgccatggtcaaagtcccttttttccaagacggcgaagacggcgaaatttgcgaacatatgtggatcgacgatatttattttgacggtctttatatttacggtgtgctgaacaatgaacccggcgaactgaccaatgtcgaacaaggcgaaagcgtttgcgttccggttgacgacatcagcgactggatgttcgtgtgcaacggcatcccctacggcggctttaccatacaggcaatgcgcgggcagatgacggaagaggagcgcaccgaacacgatgccgcatggggaatcgatttcggcgatcccgggcagatattgctggtgtatgaagaaaaagaacatcccgaaaatctggaagagcatccgatgtgccggaactgtattgacgattttcggcaacagttgtcccaaaactcggattatctgcgggaacaggacgaagacggctatacgccgcttcatcatgaagccatcgcaggaaatgcacttatggttcaagccatgcttgaatacggcgcaaatcctgcctcaacgacatcggaaggctataccgccctcgattttgcctgcctgacgggctggcaaaatgttgccgacctgctcgaaccgcgacattaggcagacagttttccgaaaacgaacacaaacactttttacagaaagacaataaaaatgcccaaaatcaccgtacttccacacacgacattatgccccgagggtgcagtcatcgataacgcacccgaaggtaaaaccgtccttgacgtgctgctcgaccatgatatcgaagtcgatcacgcctgcgaaaaatcctgcgcctgcacaacctgccacgtgattatccgcaaaggtttcgacagcctagaagagccgaccgaattggaagaagacctgctcgatcaggcttggggtttggaagccgattcgcgcctgagttgtcaggcggttgtcgccggcgaggatttgattgtggaaatccccaaatacaccatcaaccacgcgcgcgaagaacactgaaaacaggccgtctgaagccggcacgcttcagacggcattgttgcgcggataaggcgcaatcgcccgaaaacaggcgttcgtacaggcggaactttcgattctatagtgaattaacaaaaatcaggacaaggcggcgagccgcagacagtacagatagtacggcaaggcgaggtaacgctgtaccggtttaaatttaattcactatatattgatttttatcggttttctgacggaataatccagtgcggcatccgaggcggattactcggacgcgatgcaccggtatttatcggttttgcagccggaaaaaccgccggcgggttatagtggattaaatttaaaccagtacagcgttgcctcgccttgccgtactatctgtactgtctgcggctcgccgccttgtcctgatttttgttaatccactatacttttagggcgacggtcgggcagtatgccggatagcgttccactctcgcttctatattgattttgattggttttctgacggaatgacccgatgcggcatccgggacggcttgtgttttttcctgcccgcctgccggattttcccatccttgcgtgaaaccgaaagagacggcggcgcggcggacaagctcgagatagcgtccttcaagctccggacaggcggcggacacgctttctaccgtaaccgtgaaaccgccgcccgacccggcaaggcgttccgcaatttgcgtgtagatgagccaacgttgggcgcgcaacattgccgaatcgcaaccggcagccgctttatccaaggcaatcaggtcgcgccggttttggtggtgaaggcaaaccgttactctggagaggatatgttgcccgtccaatatttgatacagtttgcgtatcagcagaatcaggcggtcaaactcctccatctccgacagggaatcaggatggtcggaagcggtataaaccagtttggacaattttgcggcaaacatattgttcatcaatcttccttgtcggttgaaaccccgctcttcggggcggtagaatcagatttgtttgggagggacaactcctcccagatcaggacgacacataggctggtgcttgatgtgttgtccggcgagttgaaacattcagcaatcctcaaggggcggcagttttgccgaaacatattctacacggcttcaatgccggacgataaaaggaaattcatatgaaatggaccgacacccagcgcatcgccgaagaactctatgacctgcacggcgaaaccatcgatcccagaaccgtgcgctttacccaactgcgcgacctgattatggcattgcccgaatttgacgacgaccccgcccgttgcggcgaacgcatcctcgaagccgtgcagcaggcatggatagacgaggcggaataagtttcgggaatgccgtctgaaatgcggcggtacgcggttcgtgcttctgtttgcagcgggaatggttttaccagtctccttttttcagcctgtccagttggcggcggtcgcgcttggtcggtctgccgtcgggataggcggaagtgatgcggctgaattggtcgagctgtttgcgctcttccctcaatgttgccgttttcgcgtcctcttcatacagaagccgcgcctcggatgccgggcggcgttggtggttcaaacctttaaccttgattttatagggaagggaattgagcgtcaggtcgataatatcgccgatgtctatggttttactgtttttgaccttcgagccgtttacttgaaccctacccagttcgatgtgcttttgcgcaagggaacgggtcttgaaaaaacgtgccgcccaaagccatttgtccagccgcatggcggaagaatcgtgcttgtctttcatacgattttgtttgaaataattgaatttgtttcgagtttagcataagatacgccgccttataactagtatatatgcactaatccactgttttccatgctgtccgaacacaaaaagagggtatggaaaagccgttttggacaataaattaactgcggaatatgcacaaatagcgtatgatagcggcagaatctgttgatgagagcttcattctatgaaacctgtttttttggattttgaacaacccatagccgaactgaccaacaaaatcgatgagctgcgtttcgtccaagacgagtctgccgtcgatatttcggacgaaatacaccgtttgcagaaaaaaagcaacgacctgaccaaatcgattttcagcaaactcacacccgcccaaatttcacaggtttcccggcatccgcagcgtccctatactttggattacattgaggcactgtttaccgattttgaagaactgcacggcgaccgccactttgccgacgattatgcgattgtcggcggattggcgcgtttcaacggacaaagcgtgatggtcgtcgggcatcagaaagggcgcgacaccaaagaaaaaatccgccgcaacttcggtatgccccgtcctgaaggctaccgcaaagccctgcgcctgatgaagacggcagaaaaattcggcttgcccgtaatgacctttatcgatacgccgggcgcgtatcccggcatcggcgcggaagaacgcgggcagtcggaagccatcggcaaaaacctgtacgaactgacgcgcctgcgcgttcctgttttgtgtaccgtcatcggcgaaggcggttcaggcggtgcgttggcggtcgccctaggcgattacgtcaatatgctgcaatactcgacctattctgttatctcccccgaaggctgcgcgtctattttgtggaaaaccgccgaaaaggcggcggatgcggctcaggctttgggcattactgctgaccgcctgcaaaagctggacttggtcgataccgtcatcaaagaaccattgggcggcgcgcatcgggatttcgggcaaaccatgaaaaacgtaaaagccgttttggaaaaacaactgcacgaagcgcaaagcatcccgcttgccgatttgctttcgcgccgtttcgaccgcattatggcttacggcaaattttcggaacaataattcaggtagaacaagcagcaagcagtttgtctgaaactgcttgctttttctttatcgggacggaaccgtgctgactttagatgcgtttgagcaatgcttgaaggattgttttcctcaaggtctgaatggaaaaaaaacagcggtggcattaagcggcggcttggattccgtcgttttgctgcatctgcttgtccgcgccggaaaaaagggcggttttattccggatgcattgcatatccatcacggcttgagtccccgtgccgacgattgggcagatttctgccaaaactattgcgatatgctcggggtggggctggaaacggttaaggtctgcgtggaaaaaaacggtttgggcatcgaggcggcggcaaggcaaaagcgttatgccgcgtttgccgaaaaaggctttgacgttttggcgttggcgcaccacagggacgatcaaatcgaaacctttatgctggcggtcgcgcgcggcggcggtttgcgcgctttggcggctatgcccgccgtccgcccttttggggaaaaaggcatcatctggcggcccttgctgcctttttcacgccaagatatatgggattatgcccaaaaacacggtttgccgaatatcgaggatgaaagcaataccgatacggcttatttgcgaaaccgcttccggcaccgtattttgcccgaactttcggcgcagattccccatttcgggcggcatgtgctgaacaatgtccgcgctttgcaggaagatttggctttgttggacgaggtcgtcgttcaggactgccgttgggtttgcggggccggttatttcgatacggcgcggtggctgacgttttccccgcgccggaaaacccatattttgcggcattttctgaaggaaaacggcattcccgtgccgaatcagaatgcccttgccgacattgcccgggttttgacggaggcaaaaaccggacgttggaacttgcaaggctttgaattgcatcattatgcaggcaggctgtttgtgttccgactggaaaaaacggataaactgcggtttttgaaagacaggcagataagcggaaatttaagggaaatattgacggggcagggatttgtgttgaagcggcatccgtttgggcttcctgagcatcttttggagcaggacggaattttgaggacggtagcggcatcggatacgttggccatgggcggcatccataaggatgtgaaaaaaatccttcaggggaaacgggttttgcctgtcctgcgcccaatttggccgcttgttgccgacagcggaaaccgtccattggcgttggcaaactgttgtgcggatttccaatactcggtttcagacggcattttgcccgtccatcctgactttcccattttattttgataatatcgcaaacagatttcggcggcgttcagtcgggtattgtccggttgcatatttctaaaaggcttgtgaagtgaaacacatcagttcgaccaataatgaacacatcagacacctgcaccgcctgttgtcgcaaggaaagttcagacggcaatacgcccaaaccgttttggagggcgtgcacctgcttcaggttttcctgcaatccggcgggatgccggtcggggtatatattcccgaagcgaaaatgccgtctgaagaagtccgtaaattgacggcggttttgccggaagacgggtttttttccgtttcagacggcatattgaagaaaatcagcagcctgacttgtgcggatgatgtgcttgcgctgattgatattccagatgcgggtgctttgccggccggcggcgattgcgtggttttggacggcgtgcaagacccgggcaatgtcggcacggtgttgcgaagcgcggcggcggcgggaatcggcgcggtcattttgggcaaaggttgtgcggacgcgtggtcgcccaaagtgctgcgagccggaatgggcgcgcatttcttgtcggagatttatccgcaggcggatttggaaatatggttggtgcgctataaaggccgtgtgtttgccaccgccttgcgcgaggaaaagcaggcggttttgtacggcgaagatttgtgcgaaccgacagcctgggtgtttggcaacgaaggcgcgggggtcggtaaagcagttttagatagggcggacaagtgtgtcaggataccgatgcacgatgcaaccgagtctttaaatgtcgcgatggcggcgacaatctgcctgtttgaacaaatgcgccaacgggcggcgtattgaggaagagaaatgccgtctgaaaaaatctattacggcgtattgattttcttatgtatcgcttctatgctgctgtcgccgtttttttatgcgggtgctttgaagcccaagaaggcggcattgcggaaggacgggcagtggaaactcatctgattgtccaatgccgtggcggcggcggttttggcttgggtgtggtggaaatggttttgacagatattgctcaaaatcgtgctaatggaatccgaacaaataaagaatttggtaaaaaatttgttaaatcaacgaattaaagttttgtggaaaacaaaacagctctaagcaaatagggcgtttgtcggtaaatacggaagagttgcggcattatcgggcatctttaacaagtagtgccgtcttgacaggcaatcggtttttatgggcagcttgcaaaatcgcggatataaaattgcgaatcggttaaagtgtggggacgctatgaaaaattgcgaattttttatgacccgacaagggcaatctatgatagcggtgcagattacttaactagggaaaaacatagattagtcgtaattgcaaatagtgcttgggggctattgcttaatttatcttgttattatgacgaggttttggaaaagcggaaaataccgttcggcaaacaggaaattgatgacgatatggacaaagtgtccgcccttaagcggaagtttaaagatatttctgaaatcaaagtaggggatggttgggaatacccgttcaattatgagcagggaatgaaagaattagatgaagtgctattgaaatacattcccttttttgaagaagaacgataaaggaggttgatatgcgcgtatctaaaataattggaagtatgttgcttgttacagcggttcagaccgtattttcggcaaatgtttacgcgtgccgccataatggtaaaaccagttacagccaaactccgggaaaacattgtaccaacgcgggtttggggcgggaccgggtgtacagttcggttagaccggcagtaaaagacagggcggaagacgcaggggtcggcgattattcggacacggtgagggacgaacacgtccaaaatccgaaaggaaatgcacagaaagacggttcggctgccggcatcaagccgcactgattgaagccgaatcagcccttgcgctgtcggacggcaaaatttgaacgattggggaactttgatgaaacacatccatattatcggtatcggcggcacgtttatgggcgggcttgccgccattgccaaagaagcggggtttgaagtcagcggttgcgacgcgaagatgtatccgccgatgagcacccagctcgaagccttgggtatagacgtgtatgaaggcttcgatgccgctcagttggacgaatttaaagccgacgtttacgttatcggcaatgtcgccaagcgcgggatggatgtggttgaagcgattttgaacctcggcctgccttatatttccggcccgcaatggctgtcggaaaacgtgctgcaccatcattgggtactcggtgtggcggggacgcacggcaaaacgaccaccgcctccatgctcgcatgggtcttggaatatgccggcctcgcgccgggcttccttattggcggcgtaccggaaaatttcggcgtttccgcccgcctgccgcaaacgccgcgccaagacccgaacagccaatcgccgtttttcgtcatcgaagccgacgaatacgacaccgcctttttcgacaaacgttctaaattcgtgcattaccgtccgcgtaccgccgtgttgaacaatctggaattcgaccacgccgacatctttgccgacttgggcgcgatacagacccagttccactacctcgtgcgtaccgtgccgtctgaaggcttaatcgtctgcaacggacggcagcaaagcctgcaagatactttggacaaaggctgctggacgccggtggaaaaattcggcacggaacacggctggcaggccggcgaagccaatgccgacggctcgttcgacgtgttgctcgacggcaaaaccgccggacgcgtcaaatgggatttgatgggcaggcacaaccgcatgaacgcgctcgccgtcattgccgccgcgcgtcatgtcggtgtcgatattcagaccgcctgcgaagccttgggcgcgtttaaaaacgtcaaacgccggatggaaatcaaaggcacggcaaacggcatcaccgtttacgacgacttcgcccaccacccgaccgccatcgaaaccacgattcaaggtttgcgccaacgcgtcggcggcgcgcgcatcctcgccgtcctcgaaccgcgttccaacacgatgaagctgggcacgatgaagtccgccctgcctgtaagcctcaaagaagccgaccaagtgttctgctacgccggcggcgtggactgggacgtcgccgaagccctcgcgcctttgggcggcaggctgaacgtcggcaaagacttcgatgccttcgttgccgaaatcgtgaaaaacgccgaagtaggcgaccatattttggtgatgagcaacggcggtttcggcggaatacacggaaagctgctggaagctttgagatagcccgggcgatgccgtctgaaagcccttcagacggcatcgcccggctgcgcggcacaaaggcggaaaaaccgtttgccccgtattttcaaacgcgttacacttgccgccgctgttttcagccatttgattacccgcaaccgccgtcattgcgccggcggtttgcctgtcagcgtcattgcgccgctgtaaatacgaaagaacacattatgaccgtatcccccgtcgccttgcgccgtaagaccgagtgcaagcctcatcccaccgcgcgctattggaaaaaatgcgatgtcgaagccctgttcggacttcccttcctcgacctcatttaccaagccgccgaaatccaccgccaaaatttcaacccgcgcgaaatccagctttccacgctgttgtccatcaaaaccggcggttgtcccgaagactgcgcctattgtccgcaatcggcgcaccacaataccaatctgggcaaagagcagatgatggatgtggatgaaatcgtcgaaaaagccaaaatcgccaaatcgcgcggcgcaagccggttttgtatgggcgcggcgtggcgcggccctaaacccaaagacgtggagacggtttccgcaatcatcaaagccgtcaagggcttgggtatggaaacctgcggcacgttcggtatgctcgaagaaggtatggcggaagacttgaaagaggcgggcttggattattacaaccacaacctcgacaccgaccccgaccgctacaacgacatcatccacacccgccaacacgaagaccgaatggacaccttgggcaaagtccgcaacgccggtttgaaagtctgctgcggcggcatcgtcgggatgaacgaaacccgcgccgaacgtgccgggctgattgccagtctcgccaatctcgacccgcagcccgaaagcgtgccgattaaccggttggtcaaagtggaaggcacgccgcttgccgatgccgaagatttggactggacggaatttgtccgcaccatcgccgtggcgcggattacgatgccgcaaagttatgtccggctgtcggcagggcgcagcaatatgcctgaagcaatgcaggcgatgtgctttatggcgggcgcgaactcgattttttacggcgacaagctgctgaccacgggcaatcctgatgaggacggcgacagaatcctgatggaaaagctcaacctgtatcccttgcagtttgaaccggaaggcgaggtcgccgaagtggaaaaagcctctgggattaaagtggattattgacgattgaaaaatgccgtctgaaacccggaaaaaggctttcagacggcatttgtccggacggcatttccaatatctttttaccggcgcgtgatgctgccgtcgggcgagacatccagcccgttccccttggggaaatcgctgcggttcagataaataatccgcccgataacggttttctcggggtcgattttggggattttatcgccgacttgagtgatggggataatgttgccggaaacgaaccgcccctgtttgtcggtgataattttaaaaatgggggcgatgccgctgatgccggaggtgttgattgcgccgtaggtggcaaagttgccgccgctgtaggagatgaagcggtcgcggtaaagttcgacggcgcgagtaacgtgcggcccctgcccgaatacgacatccgcgccggaatcgacggcaagccgcgcaaactcaacgacgttgcccctgttttccccatagaagatttcggtatcgaacggcaggtgttccgcctgtttcccttccgcgccgccgtggaacatcacaatgacgatgtcggctttctgtttggttttggtaatccgttttctaactttggcataatcgttcagtttgacggcggcaaggttgggggcgaaggagacgaagccggatcttacgccgtttttcttcaggatggcggtttcaaacctgttttcgatgcccgaatatttgatgttcaattcgtcaaggttcgccctttatgccgtttccgcaccgcaaaccgccggggtcaagccctcggcgcatcctgccggaacggaatccccgtgctgccgattgacggttcaaaccccgcgcccgtttcaaataccggcgatgtggacggacaggatgcgcctgacgaaaagacagccgataccgtttccattatcggcgtgggcgacattatgctcggcagcaattatccggtcgattacctgcccgataccaatattctgaaaaacgtcgaatctgccttgcaagacgcggacattaccgtcggcaacctcgaaggcacgctgtttgacgaaggcggtacgccgaaaaaatgtgcaaacccccaaaatatgctatgcattccgaacgccctccgcatacgggcaataccttgccgacgcgggattcgactacctcagcttcgccaacaaccacagcaacgacttcggcgcgcaaggcatcacggcaacggcggcgagcggcagctcttttacatactcgatcgcgctaaagccgctgccgataacgaggccaaaattgcggaaaataccgccatcgcccagataaatttgtccatcatcagacctttactgttcagacgagacagcatttgccgcacgttttggggcttatctttcgatttgcgctacgtcgcgcaccgcgcctttgtcggcggaagtcgccatcgcgccgtaagctcttaatgcggcggagacgtagcggtcgcggtttttaggcttccatgctttgctgccgcgcgcttccatttcggcacggcgtgcggcaagctcttcatcggaaatggcaaggtggatgctgcggttggggatgtcgatttcgacggtatcgccttcgtgtaccaaaccgatcgcgccaccttccgccgcttcgggcgaggcgtgtccgatggacaaacctgatgtgccgccggagaagcgtccgtcggttaagagagcgcaggctttgccgaggcctttagatttcaggtaggaagtcggatacagcatttcctgcatgcccgggccgcctttcgggccttcgtagcggatgatgacgatgtcgccagcgacgatttggttgcccaaaatgccttctactgcgtcttcttggctttcaaacacgcgggcgcggccggtgaatttgaggatgctctcgtccacgcctgcggtttttaccacgcagccgcgctcggcgatgttgccgaacaagaccgccaaaccgccgtcttgcgagtaggcgtgtgccacgtcgcggatacagcctttttcgcggtcgaggtcgagggttttccacatacggttttgcgagaacgcttgggtggtgcgtacgccgcccggcgcggctttgaagcgttcgatggcacgggtgttttcgggattggtcacgtcccattgttcaatcgcgtctttcagcgtcggcgcgtggatggtgtgcacgtcggtgtgcagtttgcccgctttgtccagttctttcaggatggcgaagataccgccggcgcgatgcacgtcttccatatagtagtcgtggttgttgggtgcggttttgcagatgcagggcacgacgcggcttaagcggtcgatgtctgccattttgaaatcgacaccggcttcgttggcaacggccaacaggtgcaaaatggtattggtgctgccgcccatcgcaatatccatcgtcatagcgttttcaaacgcttttttggtggcaatgctgcgcggtaacacggtttcatcgttttgctcgtaatagcgtttggtgatttcgacaatcatacggccggcttcgaggaacaattctttgcggccggcgtgggtcgccaaatacgaaccgttgccgggcagggaaaggccgagtgcttcggtcaggcagttcatcgagtttgccgtaaacatacccgaacacgagccgcaggtcgggcaggcgttttgttcgacttcctcgacttgccggttgctgacattgtcgtccgccgattcaatcatcgcgtcaatcaagtccaaacggcgttcgggctggatgtttgccacgccgataaccttgcccgcttccatcgggccgccggagacgaagatggtggggatgttcaggcgcatcgcggcaatcagcatgcccggggtgattttgtcgcagttggaaatgcacaccagcgcgtcggcgcagtgggcgttgaccatatattcgatagagtcggcaatcaaatcgcggctgggcagggagtacagcatgccgctgtgtcccatagcgatgccgtcgtcgatggcgatggtgttgaattctttggcgattgcgccggctttttcgatttcgcgggcaaccagctggcccatattgtgcaggtggacatggccgggcacgaattgggtgaaggagttggcaacggcgatgatgggcttgccgaagtcggtttccatcacgccggtggcgcgccacaatgcacgtgcgcccgccatattgcggccgtgggtggaggttttggagcggtattcaggcatagtgtgtttccttgtgcctataccgtctgaaagacagggctgtttcagacggtatcgggtacggttttttagagtgggaaaagagggtattttataccaagtatcggaattttgcgggattgaaacggcgtgcggcaaaaaagaaaatccccgcaggaatgcggggacgggttcaggcgcgggcaatcgcgacggctttggatgcgtcccaaaaatcaacgggtgcatttaatacgggtttgacgatgcccgtccgtatggcgaaatcgccgaaaccttcgccgatattgcgttctgccgcccatttgccgatcaggtcgtccaattcggcaaggatttcgggcagggtgatgttttctttgtaaagacgggggatgcgtacgccttcacggtcgccgccgatatggaggttgtagcgtccgacggctttgccgaccagtccgatttccgccaacatcgcccgtccgcagccgttcgggcagccggtaatgcgggtaacgatgtagtcgtccgacgtgccgtgtttcgccataatcttatccagctcgccgatgaagtccggcagcacgcgttcggcttccgccattgccagcgggcaggtcggaaaggaaacgcaggacatcgcattttcacgcagcttgctgacatcgttgcggattaatccgtatgttcgggcaaattcttcgatttttgctttgtctgcttcggcgacatttgccacgatgaggttttggttggcggtgatgcggaaatcgcctttgtggattttggcgatttccaacacgccggtcagaagctgtttcccgccttcgtcaaccaaacgcccgctttcgatgaaaagggttaaatgccagttgccgtctatgcctttcacccagccgatgcggtcgccgcgcccggtaaatttgaacgggcgtacgggttcgaacggcatacccatacggcgttcaacttccgcgcggaagttgtccaagcccatattttgaatggtgtagcgggtgcgggcgtttttgcggtcgctgcggttgccgaagtcgcgctgcgtggttaccaccgcttcggcggccttcagcgcgtgttccggaggcacgaaacccagttccagtgaaatgttcggataggttttggtgttgccgtgttccatcgaaagcccgccgcctgccaaaacattgaagccggcaagctgtccgttaccgtctgaaacggcgacgaaatccaaatcgttgccgtagcagtccacatcgttcaagggcgggatgacgactgcggttttgaattttcgcggcagataggttttgcccaaaatcggctcgtcttcttgaaggaagtcgtcggaactttgaacttttttgccgtccacccacacatccagataaccgcgcgtgcgcggcagcaggtgttcggaaatctttttcgcgtattcgtaagcctgccggtgcagttcggactcgatcgggttggacgtgcaaagcacgttgcggttcatatccgccgccgtggcgatggaatccaaacccagtttgtgcaagaggcggtgcatcgtctgcaacttggctttcggcacgccgtgaaattggaaggtttgccggttggtcagccggatggagcggtaatgactgttttcccgggcaaatttgtccagttctatccattgggacggtttgatgatcccgcccggcagccggcagcgcaaaagcataaatttcaagggctcgagttttgcctcggcgcgttcggcgcggatgtcgcggtcgtcctgctcatacataccgtggaagcggatgagttggaagttgtcgcctttgaagccgcccgtgagcgggtctttcaaatcgtccaaaatcgtgccgcgtaaaaaattgctttcggttttcagacgttcgttgtcggatagcggtttttcttgccacgccaaaccttttgtcttggtctgtacggtcattttgtgttcctcccgattatatttaatcaataaacatcacgctgatagcgtttttcttcgcgcagcatatccaaatattcttctgcgccctcttcgtccaaatgtcctgccccgataatcacatccagcaaggcggcttccacgtcttttgccatttttgccgcatcgccgcacacatagatatgcgcgccttcctgcagccattgccaaagtccttccgcctgttcgcggattttgtcctgcacatagattttttcttcctgatcgcgggaccaggcgaaatcgtacctgtgcaggaagccgtctttggcaaactgctgccattcggtttgatagagaaaatcacgggcaaaatgcggattgccgaaaatcagccagtttttgccttccgcattttctgcggcacgttgttggacgaaagcgcggaacggtgcgacgccggtgcccgagccgatcatcacaatcggcttgcggctgtcttcgggcagcctgaagccgtcgttgcgttccacaaacacgcgcaccgtgccgtcctcttccagccggtcggcaaggaaacccgatgcgccgcccgttctggcgcggccttcgtgttcaaaacgaaccacgccgacagttaaatgcacttcatcgcccacttccgcctgtgctgaagaaatcgaatacaaacggggtgcaagcggacgcagtaaacggatgaattgttctgccgtcaggcttgccgggaagcggtgcagcacatcgacaataggcgtgttttgcacgaaatcctgcaaaacggcgttatcggcaatgattttatcgagttcttcataatgggcgaacgcggcatagcctttgacgaaagccggagtgttttgcgtgagttcgaaatgagatgaaagtgcgcgcgcaaccggcatcatctttccgcccgcctgtatttccgttgccggatcgatgccgagcaggtctaggatttccctgaccagtgccggatcgttgtcaaaccaaacgccgagcgcgtcgcccgggaggtagtgcaaatccgaaccgctcaaatcgatttcgatgtggcgcacgtctttatcggattggcgggcggtgattttctgattggccagcagggcggcgggaaagggggctgccttgcagtacctgccatccggtgccgtctgaaggccggcggggggcgttgtctgcggcgcgggcgttgcccggttttttgcggcttcttcttttaagagtgcggcgatattatctgtccaggcgtttgcggaggcggtaaagtccaaatccgcatcaacgcgttcgagcagccgttttgcgcccaattcttcaaaacgccggtcgaaatctttacctgcctgacagaaattcggataggaactgtcgcccaaacccagtacggcaaattggagtttgtccaatttcggggcttttttgccgttcagcagtttgtgcagcacgacggcttctttcggcggttcgccttcgccttgggtggaggtaaccagcagcaggcggcgttcgccggcgatgtttttcgccttatagtctttcagttcggcgcgactgacttggatgccggcggcttccaggctgtccgccgctttgtcggcaacggatttcgcattgccggtttgcgaggcggaaaggacggttacggaaaaaggttctgccgccggcaatgccgtctgaagcgcgggcagtcctgcagatgccccgtttcctgcttttgcccaagcgtagccggacagccacgcccattgtgccgcgtccagccccgacaggagctgcgtgatttcgggcggcagaggcggtaatggcggatttgtgttctgcatatcgtgttcactcataaaatcatacctgccgcaacagtgccgtatgtcgcttcgtctatcaggataaacgaaccggcggcggtgttttccgcataaggcgttgccgtaacgggtttttgaaggttgatgcggactttggcgatgtcgttcatcttcaaggattccgcgccggcctcttgttccagcgtgcggacatccaaaacgctttcaatttccccgacttttgccggcacggtttgcgtgccgtgcttgagcaggtatttgcgcgcggtgttgagcggacgttcgtcaaaccagcaaagcgtggcttccagatgtttttgcggggcgagcggggaatttttatcgacaaaaaggtcgccgcgcgaaacatcgatgtcgcggtccagccggagggttgccgcctcgccggcaaaagcctgcgccacttcccctttcggcgtgatgatttcggacacttcggcggtcagcccgttcggttcgatgcggacggtttgcccgacggcgaccgaaccgcgttcgatgcgcccctgatagcctcggaaatcatcggccttgtcggcatcttggcggacgaccagttgcacggggaaataaaaatcgtcggcggtgcggctgacttcgtccgcccccggcagggtttccaaaatggacaataagggttcgcctttataccaaggcatattgccgccggggtaaacaatgttgtcgcccaagagtgcggacatcggtacgaaatgcgcgtctttcaaaccgagctgttcggcaagtcggcggtatgcctccacaatggcgttgaatttgtcttcgctgtaatccagcaggtccattttgttgaccgccaccacaatatgcgggcagttgagttggcggaggatggcggaatggcgtttggtctgcggcagaagctgcaagggctgcgcgccgaaatccagttgggatgcgtcaaccagcacgactgccgccgaagcggtgcttgcgcccgtaaccatattgcgcgtgtattgttcgtgccccggcgtgtcggcgatgatgaatttccgtttcgccgtggaaaaatagcggtatgccacatcgatcgtaatgccctgttcgcgttcggcttccagtccgtcggtcaggatggagaagtctatggcttctttcaaacctttgcttttgccggattccaaggttttgatttggtcggacagcagggctttgctgtcgtagagcagtcgtccgatcagggtgcttttgccgtcatcgacgctgccggcggtaatgaagcggagcggggtttggtgttgtgccgtcatattttcttcctcatatctgcttaaagggtttttgaaatttagaaatagccttcttttttgcgtttttccattgccgcctcgcttgcctgatcgtccagccgggtcgcgctgcgttcggaaatgtcggcaaccgctgtttctctgataatctccgtcggcgtggacgcggtgctttctaccgggcaggtgcagctgatgtcgccgacggtgcggaagcggacatcaaggatttcggaggtttcagacggcattttcggggtgagcggcgttacagggaccagcagccccctgcgtctgaccacttcgcgcctgtggctgtaataaatcggcggcagctcgaggttttcgcgggcgatgtattgccagatgtcgagttccgtccagttggaaatcgggaagacgcgcatattttcgcctttgtgcagcctggtgttgtacagcgaccacagctcggggcgttgcgccttcggatcccattgtccgaactcgtcgcggaacgagaaaatccgttctttggcgcgggctttttcttcgtcgcgccgcgcgccgcccataagcgcgtcgaagccgtttgcctcgatggtttccaacaaggtaaccgcctgtgccgcattgcgcgaatcggtttctttgcgtaagaccaccgtgcctttggcaatggagtcttccacgcgccccactatcaggcgggcattgagttttgccgcctgcgcgtcgcggaaggcaatcacttcggggtagttgtgtcccgtgtcgatatgcaccagcgggaagggcagtttcaccggccggctgcccagccggaaggctttgcaggcgagggcgagcaggaccacggaatctttgccgccggaaaagagcagggcggggttttcgcattctgccgccacttcgcggatgatgtggatggattcggattccaaccagtcgagttgggcgttgttcggttcggttttcgtcataccatattccttatttcttctgtctgatatttatgaattatttgtgcagcccgcattctttgctgtttctgccttcccaccaccaccgcccggcgcggatgtcttcgcccgccttgacggggcgggtgcaggggtcgcagcctatgctgggaaatccttgccggtacaaatcgttgtaaggcacattgttggcgaggatgtatgcccacacgtcgtgttccgaccagtcgaaaatcgggttgtatttgccgatgccccgtccggcatcgtattcggcaaacggcagttccgtgcgtgtggcggattgttcgcggcgttgcccggtaagccaggcgtccgcgcctgcaatggcgcggttgagcggttcggtttttcggatgcggcagcattcgcggcgcgcttcaacgctgtcgtaaaaggcaaacctgcctttgctttccacataacggtcggcatcttctcgaaccggccggaaacgctttatccgcaaatggggatatgcgcgtccgagcctgtccagcaggttcagggtttccgtgtggagcagccccgtatccaaggtaaaaatgccgatattgaggttttcgccggcgataaggtcggtaatcaccatatcttctgccgcaaggctgctggcaaaccgtgcatcccggtggctgccgacaatccggtgcaggcgttgtttgagggtttccgttttttccgcaagggcggtttcgccgccggatccgatatgcggtatctgccacagggcgggtttgaacagtgtcgtttccatttttcccgccttatgccgcccgttgtccggcattcagtccgcccaatgcgggatacgtctgcccgacccggttttctccttcgccgttttcaccgaaccaggcgagtttttcgtgcagccccaccacttcgcctatgacaatcaatgccggattcggcgcggtttcggcgagttcggcaaggttggcgagcgtgccggttgcggttttttgagccggcagcgtgccttggctgataacggctgccggcgtgtcgggcgagcgtccgtgctgttgcagccgttcggcaatcagggcggctttgagcgcacccatataaatcaccaaggtctggcggctgcgggcgagggtctgccattcgatgtcgggcgcatccgccttgcggtggccggttacgaaaaccgcactttgggcataatcgcggtgcgtgagcgggatgccggcataggcggtcgcgccgacggcggcggtaatgccggggacgaccgaaaacggaatctgatggcgtgccaaggtttccaattcttcgccgccgcgtccgaacacgaaagggtctccgcctttcaaacgcaccacgcgcctgccttcgcgggccagcctgaccataagcgcattggtgtcctcttgcggggtgcgctcgccccgggcgcgcttgccgacaaaaatccgttccgcatcgcggcggacgagggacagtatgccgtctgaaaccagcgcgtcgtaaagcaccacgtctgcctgctggatttcctgcagccctttgagcgtcagcagccccgcatcgccgggacccgcgccgaccagcgagacggagccgccttgatcattttgacgactttgttccaattggcctgccaattcccgttcggcaagggtgttttgccggtttttgacgagggcggcgaaacgtccgttaaactgcttttcccaaaagcggcggcgttcggtaacggatttcagtttgcccttgacggcatcgcgccaccttcctgaaatttccgccatatcgcccaaagacggcggcagcagggcttccagcctttcacgcagcagtcgggcgaggacgggcgcgctgccggagctggaaacggcaatctgaaccgggttgcggtcgataaccgacgggaagatgaagctgcaatggtcgcggtcgtccaccacgttgaccggcttttggcagctttcggcaagatggaaaacgcgccggttgagggcttggtcgctgcttgccgcaatgatgaggaaaaccgtgcggatgtgttcggcacgaaattcttcggcaagccacaggattttgttttccgccgccaacgcggagagttcggcattcaggtgttttgcggcaaccctgacctctgcgcccgccttcagcagcaggctgattttgcgtgcggcgaccgcgccgccgcctacgaccaatacggggcggccggcgaggttggcgaaaatagggaaataattcactggctgactcctttgctgtttgcccgcaccttgtttccgatacggtgcgtcgcggcatttttgtcggaatgcgggtcattttagacaaaaggattttccccggttaaataataaaaaggtatttgttagaagctgaaagctatatgggggcggctgcggatgcggcggttttccgttttataacggtttcggaagaaaaacggcctgaagccgtttcgggcattcagaccgtttgcgtggtgaggggatgccgtccgaagggcgaaaagggcttcagacggcattgatgtcgggtttcaggacaggagcaggatggcggctgcggcaagcgaggcaaccgataatgcggcggcaagcgcggctttgcctgcaaagcggattgaggttttgccttcgatgtatttgaagccggttatcatcgggaggatgaggtttttctttttgaatacgcggtatgcggcgacggcggcgatgtggattgcagaaaaaacggcgagcagcttgaaaaagttgaggtggattttccgcataaggctgcccgtatgttcggaaaccaaatggttgaggtagccgttggtgctgaaggtgttttcatcggcggcaaaaagcccggtgccgacttggaaggacacggcggccaaaagcgcaacgaccatcagtgcgcccaaggggttgtgtccgggctggatgtgttcgggaataccgtttttcagatagccgcgtatgcctgcccagccttggacgaaacgggaaaaacgggcggtatcgctgccccaaatgccccagcagaggcgaaatacgagcaggaaaaggacgaacagcccgacgcgcgtgtgccattgcagcatatcgccgccggctttcgcgctataccacataaagggcagggacgcggcaagcagccagtggaaaaggcgggtggggaggtcccagactttggttttgtttttcataatcggtttccggcggtagaatcggtttgttttcgagccttattttaaccgattggaggggcaatgtttcccgtttttcatctttcaggcgagagccgccgccagatgcttcagacggcattgcgttttccccatgttttcaaagcccgtgcggaagattcgcacaaagggactttcggcacgctcgccgtagtcggcggatcggcagggatgagcggcgcgcccgtattggcggcatcggcggcaatgtatctcggctgcggcaaagtgtgggcgggtttcaatcaggatacgctaccttttgccgttattgccggttttcccgagattatgctggatacggcggacagtttggccaaacgtcaagatataaacgcctgggttgtcggttgtggattgggtacaggtagggcggcggtcggaacgcttgccggaattttgacggaacacacggacaagcccgtcgttttggatgcggatgcgctgaacatattatcaaccgatgccgaaacccgaaatctggcgcgcgggtgtaaaaacctgattttaacgccacaccccgccgaagccgcgcgcctgcttggaacgacggttgcgcaggttcaggcggatcggacggcggcagtgaggaagataggggcaattttcggcgcaaccgtggttttaaaggggcacaaaacattggttgcctcacccgatacggaaatctatgtcaacgaaagcggcaacgcgggattggcaacggcgggcagtggcgacgtattgggcggcatcatcggcagtctgctcgcacagggcgtgccggtttttgaagccgcctgcgcgggcgcgtggctgcacggcgcggcggcggatgtcataaaagaatcggcaggcattgcggcagggctgttggcaggggaaatcgctccggcggcaaggtggctgcgcaaccggataactaaaagtatgtaagaagatatagtggattaacaaaaaccagtacatcgttgcctcgccttagctcaaagagaacgattctctaaggtgctgaagcaccaagtgaatcggttccgtactatttgtactgtctgcggcttcgtcgccttgtcctgatttttgttaatccactataccgtctgaaaggcaagggcttcagacggcatcttcatttcccaaatactgtccggtaaagcgtggtataatgcgtagttatctcttacagtttttgaaaaacattaattatgaaacaaatccgcaacatcgccatcatcgcccacgtcgaccacggcaaaaccacattggtcgaccaactgctgcgccaatccggcacattccgcgccaaccagcaggttgacgagcgcgtgatggacagcaacgaccttgaaaaagaacgcggcatcaccatcctcgccaaaaacaccgccatcgattacgaaggctaccacatcaatatcgtcgacacgccgggacacgccgacttcggcggcgaagtagagcgcgttttggggatggtggactgcgtcgtcttgttggtggacgcgcaggaaggcccgatgccgcaaacccgtttcgtgaccaaaaaagccttggctttggggctgaaaccgattgtcgtcatcaacaaaatcgacaagccgtccgctcgtccgagctgggttatcgaccaaactttcgagctgttcgacaacttgggcgcgaccgacgagcagttggatttcccgattgtttacgcttcagggttgagcggtttcgccaaattggaagaaaccgacgagagcaacgacatgcgtccgctgttcgatactatcttaaaatatacgcctgcaccgagcggcagcgcggacgaaacgctgcaactgcaaatttcccaactcgactacgacaactacaccggccgcctcggtatcggtcgtatcttgaacggacgcatcaaacccggccaaaccgttgccgtcatgaaccacgatcagcaaatcgcccaaggccgcatcaaccagcttttgggtttcaaaggtttggaacgcgtgccgcttgaagaagccgaagccggcgacatcgtgattatttccggtatcgaagacatcggtatcggcgtaaccatcaccgacaaagacaatcccaaaggcctaccgatgttgagcgtggacgaaccgacgctgacgatggactttatggtcaacaccagcccgctggcgggtacggaaggcaaattcgtaaccagccgccaaatccgcgaccgcctgcaaaaagaattgctgaccaacgtcgccctgcgcgtggaagataccgccgatgccgacgtgttccgcgtatccgggcgcggcgagctgcacctgaccattttgctggaaaacatgcgccgcgaaggctacgaactcgccgtcggcaaaccgcgcgtcgtgtaccgcgacatcgacggtcaaaaatgcgaaccgtatgaaaacctgaccgtggatgtacccgacgacaaccaaggcgcggtaatggaagaactcggccgccgccgtggcgaactgactaatatggaaagcgacggcaacggacgcacccgcctcgaataccatattccagcgcgcggcttgatcggtttccaaggcgaatttatgaccctgacgcgcggggtcgggctgatgagccacgtgttcgacgattacgcgcccgtcaaacccgatatgcccggccgccacaacggcgtgctggtgtcccaagagcagggcgaggcagtcgcttacgccttgtggaatctggaagaccgcggccgtatgttcgtatcgcccaacgacaaaatctacgaaggcatgattatcggcatccacagtcgcgacaacgatttggtggtcaacccgctcaaaggcaaaaaacttaccaacatccgtgccagcggtaccgacgaagccgttcgcctgaccacgccaatcaagctgacgctggaaggtgcggttgagtttatcgacgatgacgaactcgttgaaatcacgccgcaatccatccgtctgcgcaagcgttacttgagcgaattggaacgccgccgccactttaaaaagctggattgatgtttactggattaatgtttaaatgatacgcgatgccgtctgaaaaatttcagacggcattttttattcggacgggctttgcggcttcttgaagctgtttcagacggcgtttttcctacccaatcaagaaactgccgccatttttccagcggtatatcgccccgtcgcgtttcggtatcgggttcggcttcccggcagcatgtcgaacaatgccgtttgaaggaatacgccttttgagtccttacaggctgaggaagagggtaaaacataccgcaaaacataccacaaaaaacggtaacggatagttgtaagcggttgatgacgattatagacaataacgggttttcccaatgaaattattgtttgaataataaaaaatcccaaaccgtaaaagtttgggatttgtatttggcagagaggaagggattcgaaccctcgatacgctattcacgtatacacgctttccaggcgtgcgacttaaaccactcatccacctctctaatggcggaaattatcccaatcgggataatttattatttggtgcccgggagaagactcgaacttccacacccatgaggataccagcacctgaagctggcgcgtctaccaattccgccacccgggcaatctaaatattgaaataaagcaaagcatttgatttggtgcccgggagaagactcgaacttccacacccgtgaggatactagcacctgaagctagcgcgtctaccaattccgccacccgggctttgctttatttgctgttttgcggtacagtgtcctgccgcaaagaagtcgctattatatagttcataaagagaatgtcaacagtccaaatgaataaaaatattaaatctttaaatttacgggaaaaagacccgtttttaagtcgtgaaaaacagcgttatgaacatcctttgcccagtcgggaatggataatcgaattgttggagcgcaaaggtgtgccttcaaaaatcgaatcgcttgcgcgcgagctgtcgattacggaagacgagtatgtcttttttgaacgccgtctgaaggcgatggcgcgggacggtcaggttttaatcaaccgtcggggcgcggtttgcgcggcggacaaattggatttggtcaaatgccgcgtcgaggcgcataaggacggtttcggttttgccgtgccgctcacgcccgccaaagacggtgattttgttttgtatgaacgccagatgcgcggcattatgcacggcgatattgtcactgttcgtcctgccggcatggaccgtaggggccgccgcgaagggacagttctggatattgtcgaacgcgcgcaaagcaaagtggtcggccgtttctatatggataggggcgtggcgattttggagccggaagacaagcgtctgaaccaaagcatcgtattggaaccggacggcgtggcgcgtttcaaacctgaatccggtcaggtcatcgtcggcgaaattgaggtttatcctgagcaaaaccggccggcagtggcaaaaatcatcgaagttttgggcgattatgccgacagcggcatggagattgaaattgccgtgcgcaagcatcatttgccgcaccaattcagtgaagcgtgtgccaaagctgcgaaaaaaattcccgtccatgtacgcaaaagcgatttgaaaggccgcgtcgatttgcgcgacctgcctttggtaacgatagacggcgaaacggcgcgcgatttcgacgacgcggtgtttgccgaaaaagtcggacgcaattaccgtctggtcgtggcgattgcggatgtcagccattatgtccgccctgacgatgtgattgatgcagatgctcaagaacgcagtaccagcgtatatttcccgcgccgtgtgattccgatgctgccggaaaacctgtctaacggcatttgctcgctcaatcccgatgtcgagcgtttgtgtatggtgtgcgatatggtcgttacctatgcgggcaatatcaaagaataccgcttctaccccgccgtaatgcgctctcatgcccgcctgacctacaaccaagtttggaaatggatttcagacggcatcgaccatccgtacaaagcccaaatcgacaccctttacaaactcttcaaaatccttcagaaaaagcgtttcgaacgcggcgcggtggagtttgaaagcgtcgaaacccagatgattttcgatgacaacggcaaaatcgaaaaaatcgtccccgttgtccgcaacgatgcccacaagctgattgaagaatgtatgctggcggcgaatgtttgcgcagcggatttcctgttgaaaaacaagcatacggctttgttccgcaaccatttgggccccacgcccgaaaaactcgccaccctgcgcgagcagctcggtctgttggggcttcaacttggcggcggcgacaacccgtcgccgaaagactatgccgcgcttgtcgaacaattcaaaggcagacctgatgccgaattgctgcaagtcatgatgttgcgctccatgcagcaggcggtttacgaaccgcattgcgacggacactttggtcttgcctacgaagcatacgcccacttcacctcgcccatccgccgctatcccgacctgaccgtacaccgcgccatcaaagccgtgttgaatcagcaaacctacacgccaaaaaaaagctggcaggctttgggcgtgcatacctcgttctgtgagcgccgtgccgacgacgccagccgcgacgtggaaaactggctgaaaacctattatatgcgcgataaggtcggcgaagtattcgaaggtaaaatctccggcatgaccagttttggtatctttgtaacactggacggcatccacattgacggcttggtgcatatcagcgatttgggcgaagactatttcaacttccgccccgaaatcatggcaatcgaaggcgaacgcagcggcatccgtttcaacatgggggacagggttgccgtccgggtcgcccgtgccgatttggatgacggaaaaatcgattttgtcctgattgccggggggagcggcagggggcggaaagttaaatcatccgcgtctgccaaaccggcagggacggcggggaaagggaagccgaaaaccgccgccgagaaaaaaacagcccgaggcggcaaagtaaggggaaggggcgcgtctgccgccgcagaatcgaggaaaaaggcaaagaaaccggttccgattaaggtaaaaaaacggaaaggcaaatcataatgctgacggggtggcttgaggaggcggggcatattttcccgaagcctccacccgattttttgatgtgggcggacggagcgttatttccagcaaattgaaacgcccgtattgaaagattgcgtttatttccaccgccgttttaaaggccggcggtattcggcagacggggcgcaaacggcgttcagacggcattttcattctttcggcgtgtccgtccgaattgctttgcccgtccgcgcaatcagcccgtgcggcttgccttgaacggacaaaaaatgccgtctgaaacccgaaaatcaggtttcagacggcatttttccttgaaaaggctgttcaaatcagcgatggtagttcggtgcttctttggtaatttgaacgtcgtgaacgtgcgattcgctcatacctgcggaagtgatttccacaaattctgctttttcgtgcatttcggcaatattggcgcaacccaaataccccatgctggagcgcagtccgccggtcagttggtggatgatgttcacaatcgggcctttgtaaggaacgcggccttcgatgccttcggggacgtatttgtcggtgctgtcggttttgtcttggaagtagcggtcggcagaaccttggctcatcgcgcccaaggaacccataccgcgataggatttgtatgagcggccttggtagagttcgatttcgcccggcgcttcttccgtgcctgcaaacataccgccgagcatgacgctgtacgcgcctgcggcgagggctttggcgatgtcgccggagaagcggatgccgccatcggcaatcagcggaacgcccgtgcctttgagggcttcggcaacgttgtgaatggcggtcagttgcggcacgccgacacctgccacgatacgggtggtgcaaatcgatcccggaccgataccgactttgacggcatccgcgccggcggcgaccaaatccaaagcggctttggcagtggcgatgttgccgccgatgacttggatgtgcggataggtttctttgacccaacgcacgcggtcgatcacgccttggctgtgcccgtgggcggtatcgacgacaatcacgtccacgccggcctcaaccaaggctttgacgcgctcttcggtgtcgccgccggtgccgactgccgcaccgacgcgcagacggccttcggagtctttgttggcattgggaaactcggtggtttttaaaatatctttgacggtaatcagacctttgagttcgtctttttcgttcagaaccaaaacgcgctcgactttgtgcgtgtgcatcagttcgcgcgcttcgtctatgcttgtgccttcggggacggtaaccagacgttcgcgcggggtcataatggcggaaacgggcaaatcgacgcggttttcaaaacgcaggtcgcggttggttacgatgccgacgactttgccgttttcaacgacgggcaggccggacattttgcgtttgcgctgcgcacgcatttccaagacttcgcggatgagcgttgtcggtgcaacggttacggggtctttgaccacgccgctttcgtggcgtttcactttggaaacggcgcgcgcctgcatttcgggcggcatgtttttatggatgatgccgatgccgccttcttgtgccatcgaaatggcgaggcgcgcctcggtaacagtgtccatcgcggcggaaagcagggggaggttgagtgtgatttcgcgggtgagcttggtttgaagtttaacgtctcgcggcagcacggtcgaatgtgcgggaaccaacaaaacatcgtcgaaagtataggctttttctacgatacgcataatgctcggtctttcagtttgtgcaagatgcacggcattatagcacgttaccggcggcttgacagtttatcaggtttaattttggtcccctttgaatagctcggttttcctttgccgaccactgttgctcccgttctttcaatttcaggaaaagcttttttctaatttttggtaagtggctcagttattgaagccctatatcgggcggtaacttccagcacaaaaaaacggagtagttctttatttattttttcctttaattttcagtatattatcttaatatttcgagggtaacatatctgctaatctagttacagccccatatattatagattcaattgaaaaataacagattcaactgtacctttcttatacctgatttctttaaagtttttcccattgtcaaaactataaaaaagtctctcttcctcaccagaatatcccatttctaatactaaacaatctatttcacaattaccccctccactcatatatgtagtatcaatagaaaatatattgcataattccagagaattatatttatctatatcaaatagttgctctccaaaatctaaaccattgtttccacctgcataatacttctcttcaaaggatgacttcaaactattaaaaactgcatttagcgtaaaatatccatatgggcatatcttaggatatatattctctcctattattatctgaatttttccataaataaaaccattacattcagagttttcttcccataaaatcccaaattttcttgttgagtccataataatattcatataaatccttatattaataaattatttacaatatcccccgctttcagacggcatacggcgtggcggcggaatgccgtctgaaggcgggcgttatgataattgttccagcagcgtctgcttcaatgaggactggatttttgggtttttcaggtcggggctaaaaacggtaaaactgtcttcggcgcgttcatccagtgtggagattttggcatagcgcaggctgacgttgtgggcgaaaaagacttccgccatatcggcgagcaggaaggggcggttgacggcggtgatttcgacggaataccagtcgggatagtcttcttcgggggtgatggtgatgctcggtgcgatcggcatatagcggctgcggcggctgatgcggcggctgcggctttgggtttcggcaacggtgtgtccgtggataaagctgttgagttcggcttcgagcgcgctttggatgtcggggtagtcttcgggggcgtgctgcgaggggatttgcacgatgaaggtgtcgaggatgtagtcgtgttcggtgatgaaggcgcgggcggcgaggatgtcgaagccgtggcggctgaagatgcggcagaggcgggcgaacaggcgcgggccgttgggcatgaaaaccatgacttgaaagctgtcgcttttgggcaggatgcggctgcggacgatgggggtttcaaagtcgtggactaggttggcggcgtgccacaggatttcgcgggactggtggcgggcgaagtaggcggaaccgagcgcgttccatagttttttctgctgtttttcggggacggcggcgcgggtgagtaagtcggcggcttcctgccggcggcggccgaagagggtgtgcgggttgccgccgttgcctgtaaggtagcgtccggcggcatggaagaggctttccagcaggctggcgcgccatgcgttccacagcttgggattggtgccgcgtatgtcggaaatggtcagaaggtagagcgcgctgaggcgttcgtgggtttgcacgcgtttgcagaaggcatcgagtacgctggggtcttggatgtcttctttttgggcgacggcagacatcagcaggtggttttcgaccagccaggcgagcaggtcgctttcttctccggtcaggaagtggtcagcggcaaattggcgcgcgtctgcgatgccttgtatggcatggtcgccgccgcgtcctttggcgatgtcatggaaaaaggcggcaaggtagaggatgtcttgtttttcaaaggactgcatcagtgcagaggcgtagggcagctcgtggctgtgcatatccaaggcaaggcggcggacgttgcggacgacggtgaggatgtggtcgtccacgggatagatgtggaacaggtcgtgttggagcaggccgatgattttttcccacgcgggcaggtagcggcccaacacgccgtagaggttgagaaagcgcagggtctgggtcagcccgttgccgttgcggaaaaaaccggcgaagcggcggcggttttcgggattttggtagaagctgcggttgattttgcgcgtcgcgccccaccaggcgcgcagggtttgcggttcgagcgcggtaatgtcgttgcgctgctgcatgatttcgacgattttgaaaatgtgttcgggccgtctgaaaaaaatatcggtgtgccgcgcggcgatttggttgttgacttggatgtagtcgtcgtcaatccgcagggtaacgcgcaacggggtggaggaaacgcggctttgcagcataggcgtgaggatgccgcccagttgtttgacggttttaatcgcgcggtaaaacacgcgcatcagttcttcgctttggcggcggaggttcaagccttcataacccatgctttcggcgacttgcggctgcaaatcgaacagcaggcggtcttcggcgcgcttggcgtttaaatgcagatggatgcggatgtgggcgaggcggcggtagccgtgcgaaagcataccggcttcggcacgcgtcaaaatccgctgtttgagcaggtcgggcaggtcggtcgccaagccttgcgccttcgctatccaaagcagggtgtggatatcgcgcagaccgcccggacagcttttgatattcggctccaatactgcccccgaaccttgcgatttggcgtggcggtgttccatctccaccagttttgcctcgacaaacgccgccacattgcgctgcgcgttcattttttccgccagtttatccaccgtttggcggttgccaaacaaaaacctagcctctaaaaacgctgtgtcccccgtaatatcattgcgcacgctttcacatagttcatcaacgctgccgctttttacagacggcatcagtttgcagtcccacagggtttgaacaaaccgggcaatctgttcctgaatgccgtctgaaagcggggcaggggagacaaccgccaaatccacatccgaacagggatacagttcgccgcgtccgaagccgcctaccgccatcaggcataacgcgctgttttgaaaatactctgcccacaatgccgccagtaaggtttcgactgccgccgtgtattctctgaaaaataccgacacgcggttggctttcaaataatgcgcttcggcggcatcgcgctgctgtttgaaggtttccagtgctgaagacaggtttgcaggcatttttattctttcgattggcgggaaaaagggaggcggatggttcggcggtcaaataccgctttcagacggcatttgtcgggtatcggcggaattggtcatcagcttcaaccgttcctgcggcggcagcagcaactgatacgccgccacgcccaaagccgccgccattttttcgatattcgacagggcgatgttccagcgtttgcgctcgactgccgacacataagtcctgtccaaaccgcattgccgcgccaattcttcttgcgaccaacccttgttcacgcggaaaagccgcatattgtatgccaataccgcccgcaaatcctgttcgtcaggcagttcggcaggcagagtcaatttgttgcccatcatttgcttccagataaatggttaaagttaagcatttgctgttacggattttacttcacataaaagccaaaaaaaaggggtggcggcagccacacccaaacacacacacatcaagaggaaagagataaaatcaagacagattgggaaacagcaaacaagcaccctgaatttcatatcggtattatcaaacaaaaacccttatcaggtattgattcaaatcaatttagattttattcgcaaaccgaaaaagaaaaacggcatatccgtttatacggatatgccgtctgatggtgcgggggactgctgtatttggcagtggtttgtgttttagtcctcttgcgccgctgtttgcaggtagttcggcagaccgattttgccgataagctcttgctgggtctccagccagtctatatgttcttcgttggtgtctttttgtttttccaacaaatcgcggctgacgtaatcctgttgcgcttctgctgtggcgatggcggcaagcagggcttcgtgtttttcctgttctttggtcaaatcgcaggcgatgatttcttcggtggactcgccaatcagaagcttgcccagttcttgcaggttcggcagaccttcgaggaacagaatgcgctcgatcaaatcgtcggcagctttcatttcaacgatggactgtttgaagaaatgttcgcccagttcttcaaagccccagtttttcaaaatacgggcgtgaaggaaatattggttgatggttaccagcagcaagcctaagtttttgttcagctcgcggataaccaaacggtcgcctttcatacggactccttttattccgaatacggattacagttggctttggtagtagttgccttcgccaattaactcgatcaggcgaagctgctgttccagccagtgggcgtggtcttcttcggtatctttcagttgggcaaccatcaggtcgcgcgtaacatagtcttgagcctcttcgcacagtttgatgccttttttcaacgcatcacgtacttcatattcggtttgcaggtcggctttgaggcaggaaaccacgtccgtgccgatattcagttcggcgcgtgccattttcggcgtaccgcccagcatcaggatgcggcggatgaagtcttcggcgtgtgtggtttcttcttccatctcgtggttgagacgttcaaaaagtttggtgtagccccattcggagtagaggcgggagtggataaagtattggtcgcgtgccgccagctcgccagacagcaattcgttcatataatcaacaacagcttgattgccttgcataatatctctctttctgtaacttggttttcggtatgtctgaacagcatctgtgtcgctattcgggatgcgtgcattgtatgcaaaagctgtcggcatgacaaattttctatttaaaatacaaacaattatcaaaagaaatagggcgtattccccgatgccttccaaatcagtatgctgtttcttatcggtttttttgctgctaaaactaagaatccatctcatccataaagaacatttacacttattaaccatagcaaaaaacaaatagagcacggttttttatcaaaatttataatgaatcgttctcattaaccgacagattcttttgagattatcggattttgggaataaattatgccgtctgaggggctttcagacggcatgcctgcccggacagacgctgcttggagcggctgtcggtttgaaggtgtgtttaatgcgaagggcaatctgtcgtatgatgtgtttgcggcaggggctttgaagaagcccggtattttaggacgaagcgcgcggctgccggggtcaatatccgctatttattccaaaccttattaaaacttaaatttaaaatcatgaagatagaaaatatcgatattatttcgccggaactgttcccgcaggaaacattcaatgaaaccgaagcattcggcgctttggtatggttgtgggcagtttcgcctatttatcagcatgccggcgtacaagaagccgccgtcaatatcttgccggtattgaaaaacgggcaatttgccttgttcagcagcaacggacaccccgtcgcctactgcacttgggcttatttcgatgaagaaaccgaatggcaatatctccaatccaatgatgttctgcgccactcggaaaactggtgcagtggaaacagaatgtggcttatcaactggttcgcacctttcggcgacagccgtatgatgaaaagaattctggtgcatctgtttccgaaacgtgaaataaggtggctgtaccaccgggggagtgaaaaaggaaaacggattatgaggtttccagcgttgtcgaaacaataaaacaaggctgcctgaaagtttcccttcaggcagccttgtttcagttctctcgaggccattcgtattttttgttttcgggataaatgtcgtcacctacacgataccaacctctttttctcatgcaggcatctgctttacttcctcctcccccacctattgggtcatagccgcactctttccagtctttttttccttagcaaaaagatcatctatttgtttgctatattcttcataagaatatatgcgtaaattgatatttttactcatcattgccggatattcttgttctatacgggaatacttccagtataccgagtcatcgggcggaggtttgaatcccccaaacgaacaggcagccaatcccatagccaaagagattgatacgatatatttcattttgtttttccttcttctcgaggccattcgtattttttgttttcgggataagggtcgaaacccttacgacaccagccttttttcctcaggcaggcatctgcttcagactttccgccgtctattgggtcatagccgcactcttgcatgtctttcagttgccttcgtcttgctttcgatggatattggtcaagtgccgccgaggctgatcccggatagggattggcgtaatttttcaattcccaaaatgacgcggcgtcccacggatttggtttaaatcccccaaacgaacaggcagccaatcccatagccagagagattgatacgatatatttcattttgtttttccttcttctcgaggccattcgtattttttgttttcgggataaatgtcgttacctacacgataccaacctctttttctcatgcaggcatctgcttcactcccaccgcccccacctattgggtcatagccgcactctttccagtcttttttttctctagcaaaagaatcatgcagttgtcttcgtctctcttcaggtgggtattggtcaagtgtcgctgaggttaatcccggataaagtttggcgtaatttgtcaatctccaaaatgccgagtcatcgggcggaggtttgaatcccccaaacgaacaggcagccaatcccatagccagagagattgatacgatatatttcattttgtttttcctttcggatgttgcagatcataaatgcgtacaggacggtacataatttcgatttcgttggacactcctctttcaaatacacctgtcggactttgggtttgtttattttcagggtctcgataaccatctgttacacattgtttattagccataccgtagcaattatgcggcgaggtgtaatcccctataatatcccttatagcctgccattggcttttttgccgggtattggttccgactgttgccggatttctgccaatcagcatgccgataaggtctaattcgtggttttctatttggatggactgacgggcgaaatctgccgttctgggtgtcgttaccccctgctgcagttgaaacagccttttatctgcccggacaacgttggcggcagggccgaccattttcagttcggtattggataaaattttcttatcccgattggcttgggtattcaaggtattgagtacattgtcgaccaccagggttccacggctgtgcgagccgacaaacaggccgtttttatccttcccgtagtcttccatgatattgcctaaagccaagcctgaattgctcaagccgataacggtcttattgcctatttttgccccttcgagcattttatgaaaggccgcaacggcgatttcgggcaattttgaaaagccccgcccattggtttccggattgtgcaggaaataaacattttcataggtgcgttcatatcggtttttctcgggattgaaacgccccacatattgttgggcggcaaatttggcggctgcttgtatattattgaaaatgccgttgacgccgacaacgattttttcaacggttttgccggtctccgggtcggtgtaacgggcagttttcagatttttccgttcctggtcggatacttcgcgcaattcgtagatatttcccccaatggctttataggcttcccaataatctttaaatgaggcaaattcttttttcaactttactgagttgtcaaactgtttatttatatcctcttcaagctgcttatcttcaatcggctcgccgttttcatccattttaaaggtcatcaggcggtgttctgcaataaactggctgcggtaggcttcgtctgcaatgccgccgatcagcgtctcattgataaactctttggcaacatccctattgagttcgacttctttcagcaagccttcgcggtctgcttttgccaatgccttatgtgcggatgaagtgcctttttcaataccggcaatatttttcctgccctgcgcggaagcaatttgccaatctccctcactgatgacggagcgggtaatggattggcggctttctgattctttggcattgcccaacagattgcccaaacccatttttgccaaggcgtatttgtcgttgctgtgtatatcgttttgcttcaaaccgaatttcaagccgccggcgttgttttgatttaaatttgcctctttaaaggtttcccctttttcaatacgctcacttcgatatttttcgttcaactcgtcgtctttcgccgaaacctggtcaaaacgcatcaggctgaccggtttgccgccgattttaccgatttctgcttcttttttggtggaatactgtccgctggtaggcttcgggctgtatgaaaaaccgccgctcaagcccaaggcggaagcagccgccgaagcatggttttgaatatctttatgccagatttcgcttgttttcagcaggttttttgatttgtcggcatctgaaacaacagcggcgccgaccaatccggttttgccgtttacgcgaatccgatagccgtctcctcctgcaaagataccgctttgctcgttgacggatgcataatccgagctgcttttcgagcggttatagctgccaccgacactaaagccgtagcctaccgtaacttgggcggaaacattttcctgtttgcctttaaacacggcggtatcctgcaaactttcgatatgcagactctctgccgttacgccaacgcctttgcctttaagctgcccgcctttgatgacggtatcgccaccgctttcaatagcggtttggctgtctttgctgccgatatggctgttgcggtaggcggtttcgtcgccgttgccgtaacctttgccgtagtttgctccggctgtgaagccgaaactgatgcctttgttgatggcgatggcgactccggcattaaagcctgcggatttgttttcgctgcgttcctgatgcgtttggcgggcggcttcaatctgaacggcattttctgctttgaggcgtgttcctttgccgccgtacacatcggagccggtaatcgtgatgcgggagtctttgcctgcgcctgaagcagtcagggaaactttgccgccgccggtgattttgccctcttgcacctgcgtgcctttgatgcggctttcggaggtgttcttctgttcgccgtaggtaacggagacactgatgccctgaccggctgcttttttgggatttcgggcggcattatagagtgccacgccggaatctactcctttattcaaggcgttggcagcagccatggcattgacccggctgtttttgcttttgccgacggtttggactgcttttacggcgtcaaccgcgcccattacggtattcacaaccggaacgctaatggcgacggttacgcctttttgttcgtaaacctgcttactctcttggctgtaacggttttgtgcggcatcgatgctgatttttccggaggaaatgccgacatcgccttggggcgaggatatggtcgaaccggtttgggtgtaatgttttcctgccgaaatcagggtattgccgttcaggctgccgacgacgctttctgtgtggctgacggtctcggatcggttggtttgcgtgtcttttttgctgcccgccgtaaagccgatgccgccgctgcccatcagtccggatttttcttttttgttcatttcggcactgcggctgcgtgtttcggctgctttaaggacgatattgttttttgccgagagaatggtatggttgtctgcaatgatattgctgccagtaacggtaatatcgcgtcctgaaaccagaatgatttctttgccgtccagcgtgccggatacggcttgtccgttttggttcttgagatggcgggtcatcttctgtttgatgccgcccccgcttctaccggtgtatttcagggcatcttcggtttcggtatgggctttgccggcttcgactttgatatcccgtccggctgccagtttcagacggccttgttcgctgccgacctctgctgcacggatacggatgtctccttttgcattcagactgagattgccccgggtgcggatggtgctgccgacttcgttttgttctttgcgaatcacatagttgtcggaatcaaagatagtgttctgattgcgggaaatgcccgtcgtatccgagcggatgtcgccgccggcattcagtacggtttgaccgtcttcagattgattggtcaattcggaagccgtcaggacgatattgttgcctgcatccagcaagacgcttccattctgcctgccggtcagataaatgcctgccacccggccgatattgcgtaccgagccttgctcattctgattgctgcgggtctcgctgcggctttctatattgttactcgctttgagcagcagggcgttttctgcgccgatgctgccggtattcgtaatgtcgctgcctgctgcggcgaagatgtttttgccctgcaaatcaccttgcagatttttaatattctgtgcgtttaaaattagtgcttcgcgcccggcaattaagccgccccggttttcaatggcgccgctgccgatatcaacaacgctgccggacagcaacgccccttgtccgttcatatctttggggcgtgcgcggacatagactttgggtttcaatacggtttgagttgtcccgtcgggcagggtaacggtctcgttttccagccaaacaatgtcggaagtcagacgggcaacctgttcggcagacagggcaatacccggagtaagctgcaattctttggctatggtaatgccgttatccatcaaagccttgaattgctcttcgtcattggtataaccgtccaagcggcggtagcctgtcagcttggcgatttgttcgtttaccagtttctgctcgtaatagccgtcgcccaaacgcttgtggatatggttcgggtcttgttgcagtgcggcaagcatatagccgctgcccagccatttgcggtagtcggtaaaggcagggtcggtttcaatcaaatagcctttgttgtttggcgcaatggcaaacaagctgctgttcggcagagtaaatgtaggatggatgccgttttcagcaacaacgggtacaacagtgccgggtatatcagatgcctgttggggcgcatagcctttataggctgaaatacccatacggatggagctgacttcgggggccggttcgtagggagaccgactgtatcccgtagaatcccgccctttcttgtgatgacggtggtaacggtgcaagtcccctttatcggttatggtttttgttcccaaagtttcatcattgtccaatgcggattcgggcgtaccgacgatcaatctgccgccggcaataatccggctgttatgatttttcagcttggcggcatctaaaaccaaattgccgccactgatgatttgaccgggcttggattcggtaattttgctctcggcggtgattcgttcgtaatcgtatttgtaccagacagagtgggggctgccgtccggagtccgcatatgtaaagactcatcttcaaatatttcccagcccaactctttttgagaaccttccggatagcgttctgttctgccttccgcctgatattcgatacggtgttcgcgatgggtttcttccgtatggaaacgcagatgctcattggtattctgcaaatcttttgtagcgatacggatattgcctgatgattcgattgccgcactgcggttgtgcagtgatgtatttgctccttgcacctgtcggcttccattcaatgcagaaccgatatgaagatcgccggagctggacaataatgccgcctctcggttctcaatttcccgcgctccaatatccaaccgctcccgcgctgcaattaccgccgctttggtttcgccgttgaccgtttcttcccggttcaacaaggtatctgcctcaactgccacacggctgccgtaaattctgcccgtgccggcattgtccgacttggcttcggtttgcagcagcgttataccgttgctgttgattaaacccctgttggtgatgccgtttttgccgtttaacccggtgcggtttccggattggattttaccggagacagtgttgtcgatttgggcggcggtcagggatacggtatcgcctgcctgtatgatgcgggtgtttttcagacggccttgggtggagaacgtgagtgtgcgtccggcttcaatatcgcgtttgccggcaaaatcatcatgaagagaaacggaaacatcgcgtgcggcggttaatatgccgtcgttgtccagtgattttgcctgtaaggaaacatctttgcccgcaataatcgtgccgtctgtgttattgatatgcaggctgcttttgcctgtatcgcgaatatccagcaaaccggccgagccgattaagcctgcttgattatttatgccgtctgaaaccttcaatacactgcctttgccgctgcggataaagccttggcggttatcaacggtttgagcggaaatggtgatttcggcagcatcaatcgaaccgctgttgctcaatttgccgtctgcgcttaacgtaacgccgcctgttgcggcaaaaatccgacccttgttgcggattacggcgccgttgtcggtgctgattaaagtgattttgtctgcgtacatcccacccagtgtggcggtgtcgatggcaacggtaggagtaacagaatccgaagaagatggcgcagaagctgttttggcaagagagccgtcaaaatccaatttgttcttacccgaaaccaccttgacatctttaccccaaacgcccgcattgatttcagcagcacgactaaggatacgggtgtaatcggcatcagaggtatccaaacctttgcccccaatcacgactttacccgaagaaacatcaaagcccgtcagattgccgttattcaaaacaggaacgcccgaagtcagcgtaaccgaagcggcattaatcaatccgccgccattcacacggatgcccgacggattggcaacgactacttcggcgcgtttgccgccgacttcgatataaccgttcaacaacgaaggattactgctgtcaatctggttcacaattacccgcgcttcgccgcgtgccagatggggattgccttgaatccatccaccgagttgcgtttgcgtattgctgcggctgttgtttagtattacgcctttttcatcaacatcgaactgcttgaatcggttaacagaaacgccttgggatgacggagtttgaatattgacttgcggcaaaccgtttgctgtctgaagaataacggcttgttggtttttaggggcggatttgtcggcaatgatgccggaagcaggggcaggggaaaacgcagcaacacccaaagccaacatgacagaaaaggcagccatacggaaaccgaaggctgcccgggcagaagaaacagaagcggcaccggtcactcgaaccgaagccgcctcactatcctgcatactcttgccgtcacgatgaacattctctgctacagccatcatacaactgcgtttcttgttgaagataaccttgtagcatcgcttgttcatgatgggttttcttaaatgaaatgtaaggaatagttaaggacaaaatataggaaatttgaattaaattgtcaataaaaaactgacagcgtaccctgataatcagatgttgtacgctaattgtgagaagtatgtcgggatgattattttgaagttttctttttattcaaaagagttactatgaaagttaaccgggcgtaaataggcttcaataaacaggttatcgttatttttcaattgggaaaaaatcttccctaacccatccattcgccaaattattatgtgggaattcggcaatttcaataacggctgttgatccatatctgctcggtcatttagcgttataaagtcgcaaatagcgtcagaatttacaagattatcggattttgggaataaattatgccgtctgaagggctttcagacggcataggcggctaacacgggtgcggcttgcgccaaacggcgcggcaggcgcagggaatcgctttttactttggcgcggtgttccgggtttaatgatgcccgcaaccgccgtggctttccctcaaggcttccgccgcctgttcgtcggcgtggtagctggaacgtaccatcgcgccgatggcggcattgctgaagcccagttcgtatgcttctttttcaaagattttgaactgctcgggcgtaacgtagcgcaggacgggcaggtgtccgtctgaaggctggaggtactgtccgatggtaatcatttcgatattgtgcgcccgcatatcgcgcataatttcacgcacgtcttcgtctgtttcgcccaagccgaccatgatgccggatttggtcgggatgtgcggcatcatttctttataacgttttaataagtctaaagaatgttgataattggcaccgggacgggcttttctgtacaggctcggatgggtttctaggttgtggttcatcacgtcgggcggggtttcggcaaggattttgagtgcgatgtccaagcgtcctcggaagtcggggacgaggatttcgattttggtgttcgggctggtttcgcggatggctttgatgcagtcggcgaaatgctgtgcgccgccgtcgcgcaggtcgtcgcggtcgacggaggtgatgacgacgtaacgcaggttcatggctttgacggattcggcgaggtttctcggttcgtcggggtcgagcatattgggccgaccgtgtcccacgtcgcagaacgggcagcggcgggtgcagatgtcacccataatcatgaaggtcgccgtgcctttgctgaagcattcgccgatgttggggcaggaggcttcctcgcaaacggtgtgcatcttttgttcgcgcaaaatgtctttgatttcaaagaatttgcgcgatgggagtttggcgcgtatccattcgggctttttcagtttttcctgaagggggacgactttgatggggatgcgcgcggttttgtccgcgcctctgagtttgatgccgcgtttggggtcgtcggttttgatttcactcattgttgtctgctttcggtgtgaattgtgtttcaaggtgtgcggtgagtttggcggcgacttcgtccggcgtggggcagggttggacaaaatccgcgatttgcgtcatttccataccggcgtagccgcaggggttgatgtgggtaaacgggcttaaatccatattgacgttgagcgcaagcccgtgatagacggagccgtttttgatacgcagccccagtgaggcgattttgcgttctccgacataaacgccggggcgtttggggtctgccgccgcttcgatgccgtattctgccaatgtggcgatgatgctgttttcaagcgcggaaacgatgtttctaacactggttttgcgccgtttgaaatcaatcatcgtataaacgaccaattgcccgggcccgtgataggtaatctgcccgccccggtcgatttggacgacgggaatgtcgtcgcgaatcagcaggtgttcgggttttcccgccagtccttgtgtgaacacgggcgggtgttcgacgacccacagttcgtcttcggtgtcggcattccgtccggcattaaaggttttcatcgcttcaaaagtcggcagatattcgaccaaacctttgtgtatgattttcatctcaaagtaccactttgaccagttcgtgcgaagtcagcgcacggtagatgttgtccaattgttcttggttttcaacctttacctgtacggtggcgccagtatagttgcctttgctgctcggacgcgtggtgatgtggtgcgcctgcgtgtcgggggcgtggaggcggacggtgtctaaaaccgcctgctcgaactcgggatgcaccgcgcccattactttcaatgggaaggtgcagggaaattcgatgagggatgttttgtttttttgttcggtcatgatgtgctgccttgtcgtgtacggtatgccgtctgaaggcgggtttgcctttcagacggcatcggatgtgcgttattttagcctaaaccgcgataacaggctatcgggaaggcggaggcttttttgacggcgcggcggttctgctatactggcgcacaatattatttttagaagggtggtttttatgtatcggaggaaagggcggggcatcaagccgtggatgggtgccggtgcggcgtttgccgccttggtctggctggttttcgcgctcggcgatactttgactccgtttgcggttgcggcggtgctggcgtatgtattggaccctttggtcgaatggttgcagaaaaagggtttgaaccgtgcatccgcttcgatgtctgtgatggtgttttccttgattttgttgttggcattattgttgattatcgtccctatgctggtcgggcagttcaacaatttggcatcgcgcctgccccaattaatcggttttatgcagaacacgctgctgccgtggttgaaaaatacaatcggcggatatgtggaaatcgatcaggcatctattattgcgtggcttcaggcgcatacgggagagttgagcaacgcgcttaaggcgtggtttcccgttttgatgaggcagggcggcaatattgtcagcagtatcggcaacctgctgctgcttcccttgctgctttactatttcctgctggattggcagcggtggtcgtgcggcattgccaaactggttccgaggcgttttgccggtgcttatacgcgcattacaggcaatttgaacgaggtattgggcgaatttttgcgcgggcagcttctggtaatgctgattatgggcttggtttacggtttgggattggtgctggtcgggctggattcggggtttgccatcggtatgcttgccggtattttggtgtttgtcccttatctcggggcgtttacgggattgctgcttgccaccgtcgccgccttgctccagttcggttcgtggaacggcatcctatcggtttgggcggtttttgccgtaggacagtttctcgaaagttttttcattacgccgaaaatcgtgggagaccgtatcgggctgtcgccgttttgggttatcttttcgctgatggcgttcgggcagctgatgggctttgtcggaatgttggcgggattgcctttggccgccgtaaccttggtcttgcttcgcgagggcgtgcagaaatattttgccggcagtttttaccggggcaggtaggcggttccgaaacatatagtggattaacaaaaatcaggacaaggcgacgaagccgcagacagtacaaatagggcaacgccgtactggtttttgttaatccactatatttgaagcggaatacaaccttgcccgggtttaaataaaaatgccgtctgaaccccgaaaactggacttcagacggcattttcatcacggcttatttggcggttttgctgctgtcgataattttcataccggcagaaatcaggctgccgatgtcggcaacattggcgggcataatcagcgtattgctttctttggcaagattgttgaacgcagcgacgtattgttccgcaatcttcagattgaccgcatccgcaccgccttgggtttgaagggcggcggcaatttgacggatggcttcggcattggcttcggcaacaaggcgcaaggattccgcttcacctttggcgcggttgatgcgggcgattttctcggcatttgacgcattgaccgcagcctgagcctcgccttcggattgttggatttcggcttcgcgctgaccactggcaaggttgatttgttcgattttacgaccttcggattcggcgatacgggcgcgtttttcgcgttcggcagtaatttgcgcctgcattgagcgaaggatttcttgcggcggaaccaagtctttaatctcataacgcaaaaccttcacaccccaagccccggccgcctcgtccaaagccgcaacaacagtactgttgatttcgtcgcgttcttcaaacgttttgtccaactccatacgcccgataacggaacgcagcgtcgtttgggcaagctgggtaatcgccataatgtagttgctcgaaccgtatgaggcgagtttggggtcggttacttggaaatagatgatgccgtcaacagtcagctgcgtattgtcgcgcgtgatgcagacctggctgggtacgtctaaagggatttctttcagcgaatggcggtaggcgacgcggtcgataaagggaatcaaaatattcaaaccggccgtcagggcgcgatggaaacgccccagcctttcgacaacgtggacttcctgttgtgggatgacaacaaaggatttgaaaccgaaaacggcgacggctaccaacaagataatgaaaaattccataattcctccgagtgttaagggtgtgtgataataagaaggttgccttccttgcggacaatgagggcgcgagttcctggttcaagctcttcttgccccgtattttgagcctgccagtgcgtaccgcgataaaaaacttcgtaacggttgccgcctgtgtgtcggaggatttcgacatattgtccggcatccaaatcctgatatgaatccgtttcaacttttctaacggcggttttggcgtgtacgaaccaaatacccagcgcggaaagcagagcggcggtcaagacggcggcaggcgtactgccggtcagcccgtaagcaatgcccgaacccgccaaagccgcgctgacaaccaaaagataaaccgttcccgtcaataattcgatgattaagacggcaacagcggcaacaaaccatacagtcatacatttccccacaaagcgcgtcgtttgacaaaataacgcaatatcagcagtatagccgaatttgaaaggatagggcagatatggacacttggcacgatgcactcggcggcgaaaaacagcagccgtattttcaggaaattttaaatgcagtcaggcaggaacgtttgtcgggacaaatcatctatccgccggcggcggatgtgttcaacgcattccgcctgacagcgttcgaccgggtcaaagccgtcattctcggacaagatccgtatcacggggcagggcaggcgcacggtttggcattttccgtccggcagggtatccgcataccgccgtctttactcaatatctacaaggagttggaaaccgacatcgaaggcttttccattcccgcgcacggctgtctgacagcgtgggcggagcagggcgtattgcttctgaacacggttttgacggtgcgtgcaggacaggcgcattcgcacgcccttttaggctgggaacgctttaccgataccgttatcaggcagcttgcgacacaccgcaagcaccttgtcttcatgttgtggggtgggtatgcacaacaaaaagggaggctgatagacagtcaaaatcatttgatattgaccgcaccgcatccgtctcctctgtcggcatatcgcggttttttcggctgccgccatttttcacaggcaaacagctatttgagccggcacggtatcgatccgataaactggaagctgtgaatgccgatatagccgttgccgccggcgtgttaaaatcgcgtttgatttgtaatttccatttattaggcaaaaccttatggcaatcaaaaaaaaatcagctttatgcatcactttgggcgggctgcgacgagttgcgcggcggtatggatgcgagcctttataaagaactatgtgcttacgctattgtttttaaaatatgtttctgataagcataagtacggcggcggcatgattgagctgcacgccggtacgacttttgacgacatcgtcaaactcaaaaacaccgccgacatcggcgaccgcctgaataagattatcgcccaaattgccgaagccaacgacttaaaaggcgtgatcgacgttaccgacttcaacgacgaagacaaactgggtaaaggtaaggagatgatcgaccgtttgagcaggcttgtcggcatttttaaaaagctcaacctttcttccaaccaagccgaagacgacgatttgttaggtgatgcctacgaatacctgatgcgccattttgcgaccgagtcaggcaaatccaaagggcagttttacacgcctgccgaagtctcccgcattatggcgaagattatcggaatcagcgcagattgccgtccagcaccagcgtttatgacccgacctgcggctcgggttcgctgttgctcaaagccgccgcccaagccggcagccaaatcagcctttacggtcaggaaaaagatgtggcaaccgcgtcccttgcccgtatgaatatgattttgcacaacaacgaaaccgccgaaatcaacaccgggaacaccttgtccgattcgtctttccgtgatgaaaacgacgggcttaagaccttcgattttgccgttgccaatccgccttatcccgcccgaaaaaaacggcgattacgcctttttgctgcatctgctcaaaagcctgaaaccaagcggcaaaggtgcgattattcttccgcacggtgtgctgtttcgcggcaatgccgaagcgcgtattcgcacggaattgcttaaccttgaccttattaaaggcattatcgggctgcctgccaacctgttttacggcacgggcattcctgcctgcatcatcgtcatcgacaaagaacacgcccaaaccgcccaatttgccgaagagggaacaaaccaagttatcagcggcggcagcgtgtttatgattgacgcatcgcgcggcttcattaaagacggcaacaaaaaccgtctgcgtgagcaagacattcacaaaatcatcgacactttcacaaacctcgttacagccgtatggtgcatttaagcgaaatcgcagcacaagattacaaccttaatctgcctcgctatatcgacagcggagaagtcgaagacctgcaaaatctcgccgcctatctatctttatggcggcatacctgcgcacgatatggacgcattggaagcctattggcaagttttaggccgtatgaaaaacgagttgtttgccgaacacgatggccactttaccactatacaacggaatcgattgcaaatctttcccactctcaacagcttaaaatcctgcgggattggtgtggaatttagggctaatctagtacagccccaaatttaatccactataaaatcgaaagcagccaaatcaaagcccatatattggcgcaccccgattacgccgccttcaaagccggacacctagcaaagtttgccgcgtggcacactcaaaacgaccttgccgccatccaaccgggcaggcttatccggaaatggagcgaaagcctgctggacgcgttcaaacccggcagcctgattgaagaatacgatttctaccaaatcctgacggactactgggcggaaaccctgcaagacgatgtttatctcatcgcccaagatggctggaaggcggttaaaaacctggccgaaatcaccaaagaaagcgatgaagccgcgaacctgaccgtcgtctttgaggaaaccgaaaccgacaaaaaaggcaaagccaaaaccaagcgcatcagcaaaaaataccgcagcgaagtcatcgcccccgagctggttgcccgccgctacttttcagacggcatcgccaagctggaagaaaaacaaagcgagctggaacgcctaagccaagaattggaaaaccacatagaagaacacggcggcgaagagggtgcgctgaacgacgtattggatgcaaaaggcaaactttccgccaaacttctgaaaaccgcattggaagaaagcggcatagaagaaggcgaacgggctgttttacaaaccacccaaacactgatgacgcaggaaaaagccgcgaaagacgcagtcaaaacccaaatcgaagccctgaaccttgccgtattcaaacaatttggccgactttccgaagccgaaatcaagcagcttgccgttcaagacaaatggcttgccgatttacaaagccgaatcgaaaatcgcttggaaaacagtattcagcagcttatcagccgcttgaacacgctggaagaccgctaccgcagcccgatggccgagcttgcccgagaagtggaaaagtggcaaagcaaagtcaatgcccaccttgaaaatatgggttttggaggctgaaatggcagcacagacaggctataaggcgagcgggttttgagacctttgcaaaattccccaaaatcccctaaattcccaccaagacatttaggggatcgcggttcgggtgtccgcaccgcttaatacgtcgtcgtccacgaactgacccatttgctcgaacgccatcgcaacgcccgttttatggcgcatatggacaactttctcccaaactggcaaagcatcaaacaacagcttaatgccttggagttatttgcacaaatatataatttaacataatatacattatgcgaactatcggaaacagttgtacgtgtccctgtggtctttccaagtaggaaaattaaagtatggccaatgcggctgaatgtatagcccggagcatccgcgtatccgaaggtactgaacgacatgccctgcatccctttcgacgcttccatccagccggtattgggaaatacgttgaccttcaatataatatacaggcagccgacacacaggatatgccgctgctttttcatcatttcttctgtcaaatccttggaacggtcgatttgaaaacacggctttacatacgccccagttccctttgcagggcttgaatattttgctgcctgtccaatacattgctttgtaatgcatttatttcttgatggttgatgttgccgccctttgccagacgtgcttgtgataacattttttgggcttcaaccaatgctttgcgttcgttgctcaattctgtttcgagaatggagcgtctgctgttgtttgagggtgcttgttgcggcggcggcgtattggattttgccggcttggatactgttttgaccggggctttatatttgacaacctgtccgccgtttgacggtgatgataccggttcgggcgtttggggcgggatatagcgttcgctgctgtagttgccgattgggggcaaatcggttgagtggcagcttttggacggcttggtggtgtaaacggtttctccgttgattgtgcaggtgtagattttggccgcattcgcacccaatgggcttgaaatcagggaaaagttgattaggattaagaggagttttgatttcataatgtgcttgattttcggataatcatttgattttttggtattttttgtaatgctttcttggcgttttacgggcttttcttttcggttggttgcttttgattttctttcggggctttggcagcctgcttgttctttttcccggcaggttttttgtttttctttttactttctatgtgtattttggcttcttaactgagttttttaattttcaggcggtatccgcctccctgatggctgctgattttaggtaaatccgcatcggcgcacaatcctgctggggctgatgtatatacgcttttgccatttgagttgcaatggtatacggaggcttgcgccgccgcgccggaaagggacaggagacccaaggcggcaaaaagtctgatgtttataccggtaaaaggcggtgataacgcccgaattataccgttattggcaggcaaagataagcaccctgcccgcgcttctttatcgctcggcaaactgtttctcgatttcagtttcaatctgttccaattcttcttggcaagccagccaaacctcttcgatttgggcaagttgtgttttgacttttgccagctcggataaggtgtcctgcaatttttctttgttttcctcgaagtaagcttcttcttgtgctaaaaatgcttcacatgccgtctgaatttcggaaagctgcgccatttctttttcggcacggtctattttctgctgtatcggcttgccgcgtcgggctttttcctgacggatttgcgcttcgatgcgcttggtgtctttgcggctttggctttgtgcggatgctgcgggcgcgacggcggcgttttcctgtgccaaacgccattggcggtagtcgttcaaatcgccgtcgaagttcttcagacggcctttatcgatcaggaggaagctgtcggtcgtggcttcaagcaggctgcgatcgtgcgatacgacgattaaggcgccttggaaactttgcagagcgagcgtcaaggcgtggcgcatatccaaatccaaatggttggtcggctcgtcaagcagcagcaggttcggcttttgccagataatcatggcaagagcgagtcgggctttttctccgccggaaaatggttcggttttctgcaacgccatatcgccgacaaaattgaagcctccgaggaaatttcggatttcttgttcgcgtacttcgggagaaagctgctgaatatgccaaacagggttttggtcggagcggatggtatcgagttggtgttgggcaaaatagccgatattgagtttttcggaacggacgatgctgccggagagtaaatcgattgtgcctgccaaagctttgataaaggtagatttaccgctgccgttgacacccaataaaccatagcgcgcgccgctttccagcgacagggtaatgtcgtgcaaaacagttttgccttcgtaacccaaatctgcgtgttctagctttaacaaaggattgggcagatggtcgggatggtaaaactcaaaggaaaactcgctgtccagatgcgcgggagcgatgcgttcgagcttcgccaaagccttcatgcggctttgcgcttgaacggctttggtggctttggctttgaagcggtcgataaaggattgcaaatgtttgatttgcgcctgctgtttgacataggcagcttgttgttgcgcgagacgctgcgcacgttcgttttggtaaaaatcgtaattgccgccgtattgcgtgagtttttgctgcgataattcaatggtttgggtagtttccgcgttgagaaaatcgcggtcatgggaaatgatgatttgcgtgcagggtaaagaagcaaggtggttttccagccacaagacggtttccaaatccaagtggttggtcggttcgtcaagcaagagcaaatcggcgcggcaaatcagggcttgcgcaagattcaggcgcatacgccagccgccggaaaaggatttgacggggcggctgtgttcttcttgcgaaaaacccagcccgttcaacaattttgccgcacgcgccggcgcggtataagcgtcgatttcttccaatttagcatgatattccgcctgcttcatgccgtcattttgcgcttctgcctgcctcaatgccgtctgaaaagcctgcaactcggcatcgccctgcaaaacgtaatccaaagcggaaatatccaaatcgggcgtttcttgggaaacggaagcgagccgccagtttttcggaatcgagacatcgccgccgtcctgagtgatttcacccttgattaaggcaaacaggctcgatttgcccgttccgtttttgccgatcaaaccgacgcgctgaccgggattgacggtagcgttggctttgtcgagcaggactttcaaaccgcgttgcagggtgaggtttttgatttcaatcataacggaaacatcgtcgggcgggaaaagcccgtattttacctgaaagtcagtgccgatgccgtctgaaacgggaaatttacggctgaagccaagcccaagccctgcgcccttccgagtgcaggaaaaccaatgtcctgaatgccgaatcggtattcatgcattccacgctgattccgattcgggaaaaatccgccatgattttgggatggataaactcctgagccgcgcccgtcccgataatcaatatttccggatagtcaacaggtttgacgtcggacaacaggttttccggagtcagatcggacaaggttcggcattgcgacaggcagaccgaatccttatgtacaagcacgggtttatggaaactttgccccgccagccggattccgcccgcaccgcattcatattccgcaaactgtccgtctatcggattttcttcaaacaacatttttttaccccgttgccgcatcatctacaccgaaagggatgcaaaatcagacaaattcatgtaggattggcagatttcatctgacccgcctgccgatttcagacggcatttgattcaaagtgcggcacaattatatcggcagcggatattttcgtctttcaatatttacatttcagtcggcttacaaggagacacaatgaagccagtaaacatcggtcttttaggtttgggtacggtcggcggcggtacggctgccgtgttgcgggacaacgcggaggaaatttcccgtcgcttggggcgcgaaatccgtatttctgccgtgtgcgatttgagtgaagaaaaagcccgacaaacctgcccgtccgcagcctttgtcaaagatccgttcgaactggtcgcacgtgaagacgtcgatgtcgtcgtcgaattgttcggcggtaccggcattgccaaagatgcggtgttgaaagccattgaaaacggcaaacacatcgttaccgccaacaaaaaactgctcgccgaatacggcaacgaaatcttcccgctggcggaaaaacaaaacgtcatcgtccaatttgaagcggcagtagcgggcggtatcccaatcatcaaagccctgcgcgaaggtttggcggcaaacaggattaaatccatcgccggcattattaacggcaccagcaacttcatcctctccgaaatgcgcgaaaaaggcagcgcgtttgccgatgtactgaaagaagcgcaggcattgggttatgccgaagccgatccgaccttcgacatcgaaggcaacgatgcgggccataaaatcaccatcatgagcgcactggcattcggcacgccgatgaacttttccgcctgctacctcgaaggcatcagcaaactcgacagccgcgacatcaaatacgccgaagaacttggctatcgcatcaaactgttgggcattacccgcaaaaccggcaaaggcatcgagctgcgcgtccaccctaccctgattcccgaaagccgcctcttggcaaacgtcaacggcgtgatgaacgccgtgcgcgtcaacgccgatatggttggcgaaaccttatattacggcgcgggcgcgggcgcattgccgaccgcttccgccgtggttgccgatatcatcgacatcgcccgcctggttgaagccgataccgcccaccgcgtaccgcatctggcgttccaacccgcgcaagtccaagcgcaaaccatcctgcctatggacgaaattaccagcagctactacctgcgcgtccaagccaaagacgaaccgggcacgctggggcaaatcgccgcgctgttggcacaagaaaacgtgtccatcgaagcactgattcaaaaaggcgtgattgatcagaccactgccgaaatcgtgattctgacccacagcacggtcgaaaaacacatcaagtcggcaatcgcagccatcgaagcactggattgcgtggaaaaaccgattaccatgatccgcatggaaagcctgcatgactgagccgaaacacgaaatgctgacgaaagagcaggttgccgcgcgcaaaaaagcaaaagccaaaatccgcaccatccgcatttgggcgtgggtcattttggcgttgctcgctttaaccgccctgctctcccaatgcgcgatgtccaaaccgcaggcaaaacagaaaattgtcgagtcttgcgtgaagaatattccgtttgccgaaaaatggcaaaacgatttgcgggcccgcggtttagattcaaacaatacccgcctcgccgtcgactactgcaaatgtatgtgggagcagcctttggacagattgagcgagaaacagattagatccttcggcaaactcggcgcacaagaacagcttgacctgctcggcggcgcaaatgcctttgaagcacgtgacaagcagtgtgttgccgatttgaaatcagaataatgtggaccgataaaaaagccgattctttaaagaatcggcttttttcataaaaaacggcttacagtgcgtctttcaaagctttgccggcgcggaatttaggcgttttggcggcggcaatggtcagaggctcgccggttttggggttgcggccttggcgttccgcacgttcgcccacgtagaaagtaccgaaaccgaccaaagtaacggtgtcgccttgtttcagggcggtggttactgcattggtagtggcatccaaagctttttgtgcggcggctttggaaatgtcggcttcttgagcaatcgcttcgatcaattcagacttgttcacaatcagtcccttcctgtcttaaaaaatgatgaaatgcccgaatactcggggtttgtactgcttgagcaactttcgctttatagcaattctgaaattgccgtgtcaagcaaaaaatacggaatcaccctatttgacaggctttcaggacgaaaccgcatttttacaacacatttcctgcgtttcaatgtttggttgccctgctgcggggttttggttttgaagcggattccgccgccgcttccgcaccagaaggttctgcccaaggctcaggctggctttccaaacccagagccaatacctcgtctatccatttgaccggatggatggtcaggccggttttcacgttttcagggatttcttccaagtctttgacgttgtctttcggaatcaggacgtgtttgatgccgccgcgcaaggcggccaacagtttttccttcaaaccgccgatgggcaaaacttcgccgcgcagggtaatttcgcccgtcatcgccacatcggcgcgtaccgggattttggtaaaggcagataccgccgccaaggtcatcgcaatacccgcactagggccgtctttcggcgtcgcgccttcgggaacgtggatgtggatgtcttttttctcgtaaaaatcaggagccaaacccactgattccgcacgggagcggacaaccgaccacgctgcggacacggattccttcatcacatcgcccaactggccggtgcactgaatcacgcccttacccggcaatgctgcggcttcgacggtcagcaattcgccgccgacttccgtccacgccaaaccggtaacctgcccgatacggttttcgctttcggcaacgccgtaatcgaagcggcgcacacccaaatagtcgtgcagatttttctcatttactttaaccgctttaggtttggctttgctggttttcttggtttcagacaacctcttcttatcttcgtccaaggtaatctgcatcaccaccttgcggcagattttggcaatttcgcggtcgagcgaacgcacgcccgcctctcgggtgtaataacggataatatcgcgcaccgcgctttcttcgattgccaattccccttcttttacaccgttgcgcttcatttgcttcggtacgaggtactgcatcgcgatattgattttttcgtcttcggtatagccggacagacggatgatttccatacggtcgagcaacggagtcggaatattcagactattggatgtggcgataaacatcacatcactcaaatcgtaatccacttccgcataatgatcggcaaacttgttgttttgttcgggatcgagcacttcgagcaacgcgctggcgggatcgcctcggaagtcgttacccaatttgtcgatttcgtcgagcaggaacaaggggtttttcacgccggcttttgccatattctgcaaaatcttaccgggcatagagccgatataggtgcggcggtgtcccctgatttcgctttcgtcgcgcacgccgcccaaagccatgcggacatatttccgccccgttgctttggcgatggattcgcccaaagaggttttgcccacgcccggagggccgaccaggcacagaatcgggcctttgagtttgtccatacgtttttggacggcgaggtattccaaaatccgttctttgactttttccaggccgtagtggtcggcatccagcaccagtccggctttggcgatgtctttgctgacgcgggattttttcttccacggcagctcgagcaaagtgtcgatgtagttgcgtacgacggtggattccgcagacatcggtggcatcattttgagctttttcagttcggacaggcatttttcttccgcttctttggtcatacccgcctttttgatatctgcttccaaggcatccagttcgccgttttcgtcttcttcgcccagttctttgtgtatcgctttaatctgttcgttcagataatattcgcgctgggatttttccatttggcgtttgacgcgtccgcgtatgcgtttttcggcctgcataatgtcgagttcggattccagctgtgccagcaggaattccatccgtttgccgatttcgggaatttccaaaatctgttggcgttgcgccagtttcaactgcaaatgcgctgcgaccgtatcggttagccggctgttttcggcaatgccgttgatgctgccgataatttcggcggggatttttttattgagtttggcgtattgttcaaactgcgccaacagggtgcggcgcacggcttcgaggtcggtattgccgcccgtgtcttcttccacgaccgtctctatatgggaaacgaacagaccgcccgtgtcttcaatggtcagaacacgtccgcgatacagcccttcgaccaatacttttaccgtgccgtcgggtagtttcaacacttgcaggacttgtgcgaccgtaccggtctgatacaggtcggcggcaatcggttcttctaccgccgcatcggtttgcgccaacaggaaaaccggctcctcgcgggtaatggcgttttccagtgcggcgatggatttcggtctgccgacaaacagcggcagaaccatatgcgggtaaacgacgacatcccgcaaaggaagggttgccaaggcggcatattcctcaaaatgcttttctttttgtgtcataggtactctcttgtgtctgacagattgccgattttcgcgtacattggggttgaaggtattatttcaagcatatgtggtttatttatggagtttgatgcgatgccgtctgaaacattccggcttcagacggcatgggcttggaaagacaaggcgggaacaaaaaactgttctgtgttgccgctccttgctgtaccatccgtatggtttgcggttctgccgccctattttcaaaacatgacgcaggtatcccatgtcttcttttatttttcccgatgacgggttcgaatggcgcaacgaaagtctgcaaaagccgcccaaaggttggcattatgtccgcgaaagcggtgcagacggcattttgaaggctgcctatcaaaatattgcaactgtctagcagggcgatttccacaatgccaaacaggtgctttctgcaatgaagaagagggttcgcaaacctgccgccgtccgttccgatgcggatatcgccgcccttttccatgcccaccgtatgaagcaggcgcagcagagccgtattctgaatatgcttgccgttgaaatccgccccggttttgtgttggacaacaaacgcgcgcccgatatacgctccgctttgctcgacgtgtacggagaggcggacggcaaaccgtttttcctgccgctcaatctgctgctggggtttatgggtgcgcacgagtggcataagaaaggggttgccgttccgcagctgggcggcagcatacacgttcctttcggcgtattctcgccgttgcgcggcgaatacctcgacctgctcgcccatgcgccgtcaacgggttttcagacggcattcgatatcgggacaggctccggcgtgcttgccgccattttggcgaaacagggcattccttccgtcatcggcacggataccaatccgaaagccgtcgcctgcgcccgtgccaatattgcccgtttgggctttgaaaaacaggttgagatacgggaaaccgatctgtttcccgaagggtttgccgatctgattgtctgcaatccgccctggcttcccgccaagccgacttccgccgtcgaatccgcgttatacgaccccgaatctgcgatgctggctgcgtttttgcgggatgcgccgaaacatctgaatcccgacggagaaatccgcctgatcatttccgatcttgccgaacatctgcacctgcgtccatccgattttctggataaggcatttgctcaggcgggtttgcgtgttgccgatatgatgaaaaccaagccgaagcacaaaaaagccgcgaatccgagcgatccgcttgcttttgcgcgaacccgggaaaccactttcctataccgtttgaaaaaggcataaggggcggcggcgcggcattcgggcggattattcttgtgaaaatacccgctcgagcatactgcccaatgccgtctgacgcgttttgacggtggcggcagcttgccggaaggcttcttccccgccgaagaatacgaacttctctctcgcgcgggtaatggcggtatataacagctccttactcaatccggacaatgcatcgtccccttcgtccgaaggtgcggcggaaggcggcagcagccatacttcccggtattccgaaccttggcttttgtggacggtcatggcgaatgcgggttcaaattcgggcaggcagcttaccgctacctttttaaatccgtccgcatcggcaaaataggcggcaaggctgccctgccgtccgacatcttccataatcagtccgatgtcgccgttgaacagttcaagcgcgtagtcgttctgcctgatcataatcggctctccggcaaaatatgccaaatgttccggtatgttcattttgcggcgtacatggcggcaataggcttcgttgaagtcttccgcatcctgccgccaagctgccagaaccacgatatccgaaatgcccgcgtatgcggcttcgatattgccgtcttttaccgcctgccaataggctttgtgtgcccggtacaacctttcgactcgagcgttcggactgcattccgaatgttccagttcgtccggaaaccggtcaaacaatgcccacgccccttcatcgcccgatacggcggcacgggcaaggcagccgatgccgctgttgtcgccgaagcggtggctgaacgacagatgggcggtgttttgcgccaacacgggtggatttgcgctgacgctgaaaccgtgttccggaaggaagccggccagcctttggtgcgtttctccgtccaaaacggttttttgtgacaaaacggacagcaccgcccctattccgacggacgggagctggttttcatcccccagcagaatcacgcgcgcgccggttttgaccgcttttaaaagttgcagcatcaatgccgtatccagcatagaggcttcatcgataaccaatacgtcaaacggcagcgggtaaacagggttgaacgccgcctgcattttgggcgggcgcagcttcagcagtcggtggacggtttgcccttccagtttgagcaaatggcggcggacggcctccggcgcgtcaaaaccgttgattgcacggtgcagcgcgcgcgccatatgtgccgccgctttgcccgtcggtgcggcaagcgcgatgttgggaagattttcgtcttcaccgcaaatcagcgccagcagtttggcaaccgttgtcgttttgcccgttcccggcccgccggtaatcaccataaaagactgcaacagtgccaaggcggcggcatcgcgctgcccttcgctgcccgtgccttgaaaccattttgcgaggttttgcctcgcgcctgccgcgtcgggggcggatgtgccggctgccgccaagcgttttatctcggcagccaaatcgtattccaactgccacatcctgcccaaaaacagccttctgccttccaaaatcaaaggcgcggcggatgttccgacaacgggtgcgagtgccgacagcgcgtcagcctcgccaccgctcaaacggataaacgaatgaccgttttgcaatgcctgaaacaggcgttcggtgcagtttgcaagcacttcgtcgccggaacccgcatagtgttccaaaaaacggattgccgcccttgccgccgcttgggcaaattcatctgtctgccgttccattttattccttatccaaatgccgtctgaaggcgtggggcttcagacggcgcggtgttgtttcggctgtttaggcgtttgcgccctgtttggggtgcaggctgccgtctttcatgaccatcacgcgctcgaagcggccggcgagttcgtcgtcgtgcgttacgaccaccagccccgttcccaattctgttttcagttccagcatcatatccaaaacattcctggcgttcgcacgatcgagattgccggtcggttcgtcggcaagcaggcatttgggttgggtaaccaaggcgcgtgcaatggcggcacgctgccgctcaccgcctgaaagttcgcccgcgcggtgcgtcgaacggtgtttcagtccgaccttttccagcatcgccattgccgcctccgcagcctcttcacggctttttttgccgatcagaagcggcatcatcacattttccagtgccgaaaattcaggcagaagatggtggaactggtacacgaaaccgagatggcggttacgtaaatcgcccaaacgccgctggtttaaggtacgcaaatcctcgcccatcagcagcaccctgccttcagacggcatatccagcccgcccaaaatatgcagcagcgtcgatttgccgctgcccgaagaaccgatgatgccggtgctttcccctgcgtggatttccaaatccaagccgtgcagcacccgaacgtccaaaccgccgtcccgatagcgtttgcccacgccttcgcatttcaaaatcaactcactcataacgcaaagcctccgccggttgggtttttgacgcgcgccggctcgggtagagcgtggcaacgaaagacagtcccaaagaaatgcaggcaatcagggcaacgtcgcccatatcgacatcgctgggcaggtagtcgataaaataaacctgcgaattgatgaggtggacaccgagcaggttttcaaaaaacgccacgaccctgccgacgttccaacccaaaagcacgccgcagaccacacccgccagcgtgccgaaaaagcctgaaaacgcgccctgcaccataaaaatcttcatcacgccagcaggggaaagacccaaagtccgcaaaatcgcaatgtccgcctgcttttccgtaaccgccatcaccagggaagagacaaggttgaacgccgccacagcgataatcagcgtcaggatgatgaacatcatccgtttttccagttcgaccgcttcaaaatagctgcggttgctgtacgtccaatcgcgcacccaaaccgcgtccctttgcgcctccggaatcagtgttgccgtcaaggcgggagcgttttgcggatcggcgagcttcagccgcagccccgcaacttccttatccaaacggtacagcacgcgcgcgtcttggatatgcgtcattgccaatgagttgtccacttcgtaaacgcccgtcttaaccagaccgaccacggtaaactgtttcaacctcggtacgactccggcgggcgtaacattgccctccggcgtgatgacggtaactttattgccgacttccgcccccaaagcctccgccaagccgacaccgaggataatgtcaaactcgcccggaatcagatcttcaaatttgcctgccggcattttgtcgccgtattccaccactttgcgttcttcagacggcaaaatgccgcgcatctgcacgcccctgatttcgcccgcattggccagcaatgcctgattggaaacatagggcgcggcagccaaaatacctttgcggttttcggtaaaccgaagcaggttgcgccaatccgtatccgtattatcgatatagccgatttcggcgtgcggcgcgacattcaggagctgcccgcgtatttctttctgaaagccgttcataaccgacaagacgacaatcagcgcggttacgcccaaggcgattccggcaatcgaaaccatcgtgataaacgacataaagccgttgcgctttttcgccctgagatacctcaagcctatccaagcctctagagaaaacataacgctaccttaaaaatgtctgcaaacgtgccgccccggacggcggtttgggggcggcggcaaaagtttattgtaccgtaaaacccaggcagcgtccgaacgcccgagtgcgggggacggggcggcagagcgggcggaaaacttgcacaacgcgtcaaactgccctatcctttccttcagaaaaaccgtttcttgaggaaaacaatgaatatccgaactgcttttgctttgtgcgccatcgccttatccgccgctgcggctgcctacgccaaagaaatcaaaatcgatgccaacaacacgccttattccgaagccgacgcgcaaaagctggcggcaacggcagtcggtatgggtgttaaggaacctatcagcctgaacggcggcagcggcagcattaccgtgtccggcagcagcgcgacgcagtgcgtgttcaaagtcggcaacggaggcgcattgcagattcaagggctaaactgcaagtaaaccgcccggaaaaatgccgtctgaaggcttcagacggcattttgcattggcggcgttatgccccgccttctttaatcaggcggcgttcgtacaccgcctgcgccagcgttcccgcatcgacatattccaattcgccgcccaagggaatgccctgcgacagcctgctgactttgtaaggcaggtttttaaaaaactcggacaggacatacgccgtcgcattgccttctgcggtaaaagcggttgcaataatgatttcttcgacttccccgccgcccagccgttgcgccagcctgtccaatgcgatggcggatacgtccattcccaatgccgtattgatttgccccatcaggacgaaatacagcccgtcgtggcagtttgccgcttccatattcgacacgtcggcaggcatatgcaccaccatcagccgccgcccgtcgcgtgtttcatcggcacaaatatcgcacaatccgccttcgcaaaacgtgttgcacatcgcgcaatggtaaacctgcttcaatgccgtctgcaaggcatccaccagtttttcagcctctttgcgcttgtgttggagcaaatgatacgctatccgctgtgccgatttcggcccgacgttgggtaaaaccttcagcgcgtcgatcaatccttggaaggcatcttgttttttgtggctcatcatattccgccgtatgggaaaacggccggaatattccgaccgttattttgtcaacaaaagtgtcaattactgaccgtcgccgttgtcgaccgattgcgctcctttggtctgtttgattttgccgttgaaataacgtatcaacaagtcgaaagtattggcagactgctgttgcgccaaagcctgttttgcaagcggaagctgtgcggcgatatcatccggcggggttacagcctgtacttcgacaatcacgggtgccggcagaccgatcagcctgacgtaggcgggtttgccgtttgccggttttgctttcagcagttccgcataagcctcgggcggcatggactgccttgcctgctgtgcgcccaaaacggacacttccgaccatttcacgtcaacagccttgccgccgttcagttgggtaagcacgtcttttgccttgttttcggcaagtttggcggcttcggtacggatataagcctgacgtaccgcgtctttggcttcggcaaacggcagggttttctcttcgcggacttctttggcgcggacgacccacgcggtttcgctgttgatggtcagcacttcggaattgtgttttttcttcaatacgtcgtcgctgaatacggcattgatcaggttttcgggcataccggacatttgcgcgtcctgcctactcagccaagtttcttgggtttcgactttcaaaccgctgtttttggcggcttcggcaagcgaggaaggatggttgaacgcatcgtcgcccaatttttcttttgccttgttgaagtcggcaaccgcctttttcattttcaattcgttttcgacggcggctttttcctgctcgaaagaaggtttggcttcatttgccggcaaacgcgccacgcgctcttcaaatgcatttttcacttccgtttcactgacggtctgcttgtctgcaaaatccttcagattcaaggcgacatattccaatttgaccgcctgcggcagcagatagtcttttttgttcgcattataaaatttctgcaaatcggcttcagacactttgacttgggcgatgaactcgtcggggttgaaagtgtgcgaacggatggtgcggttgacctgtgtcagcctgatcagctgttccgcctgcgcgtcgccgaccaatacgccgttttggacgaggtttaccaaattctgcaaggcaaactgatcgcggatttcttcgacaaactggtcttcagacatatggcgttgggaaaggtagcggtttaaaagcgcgtggtcgaatttgccgtttgcgtcgtggaaattgggatcgtccacgataatttgcttgatttgttcggaagaaaccgaaatgcccatcagcttcgcgccctgtttcaggtaggcgcgttgcagcagggattggaacaccgcgtcgcgcgaagggccgccgccgtccgcctgttcgttctgtatggcgttgttgatggagtggtcgctgattttttcgtcgcccacttggacgatgtagtcggcacccggatgggataccgtgctgaccccgaagccgacgaaggttaatgcaatcaggcccaaaaggacttgggcgggcgttctgtatttttcgatggaatggaacatattttaaatcgggatatagaatgggaacgggaaattcaagtcgggtattgtaacggtttttatccctgtctgcacggggcttgccggttgaagatgccgtcgtaggtttcttcgctgaagccggcgtaaaccttgccgccgcactccaatacgggacgcttgatcaggctcggcatttcggacatcagtttgacggcctccgccgtcgaggacagcactttttgctgtgtttcggcatcgagtttgcgccagcttgtcccgcgtttgttgagcagggttgccaaaggcacttgttccagccacgagcagatttccgcttcagacggcctctgttttttaaaatcccgaaattcaaactccaagccgtatccggcaagccggtttttggcttttttgaccgtatcgcaatttgggatgccgtgaaggactatcatttggaaaccttttgtctgaaataataaaacggatattttactataagtgtctgaaaatttgcccgtctgtttcagacggcggggcggttatgttacaatccgaaaattcgaaaaatttaatctcttgttcaataaaggctttaccaatcatgatttctaccaacggcatcaccatgcagttcggcgcaaagccgctgtttgaaaacgtatccgtcaaattcggcgaaggcaaccgttacggcttgatcggcgccaacggctcaggcaaatccaccttcatgaaaatcctcggcggcgatttggaacagacggccggcgaagtggcgattgaaaacggcgtgcgtttgggtaaattgcgccaagaccagtttgcctacgaagacatgcgcgtgctggacgtggtgatgatggggcataccgaaatgtgggcggcgatgaccgaacgtgatgcgatttacgccaatcccgaagccaccgaagacgactacatgaaagccgccgaactggaagccaagttcgccgaatacgacggctacaccgccgaagcgcgtgccgccgaactgttgagcggcgtgggcatttccgaagatttgcacaatgcgaaaatggcggaagtcgccccgggcttcaaactgcgcgtattgctggcgcaggcgctgttctccaagccggatgtattgctcttggacgaaccgaccaataacttggacattaataccatccgctggttggaaggcgtgttgaaccaatacgactccacgatgattatcatcagccacgaccgccactttttgaacgaagtctgcacgcatatggcggatttggactacaacaccatcaccatctatccgggcaactacgacgactacatgctcgcctccgcccaatcgcgcgaacgcgccctgaaagacaatgccaaagccaaagagaaactgcaagagctgcaagagttcgtcgcccgcttctctgccaacaaatccaaagcccgtcaggcaaccagccgtctgaaacaggccgacaaaatcaaatcggagatggtcgaagtcaaaccttccacccgtcaaaacccgtatatccgttttgaagccgatgaaaaagccaagctgcaccgtcaggctgtggaagttgaaaaactggcgaaacgctttgaaacccagttgtttaaaaacctgaacttcatccttgaagcgggacaacgcctcgccatcatcggcccgaacggcgcgggcaaatccaccctgctgaaactcttggccggcgcgtacaaccccgaatattcagacggcctgttgccggacgaaggcaccatcaaatgggcggaaaaagccagtgtcggctactatccgcaagaccatgaaaacgacttcgacgtcgatatggacctgagcgaatggatgcgccaatgggggcaggaaggcgacgacgaacaagtcatccgcggcactttggggcgtttgctcttcggcagtaacgatgtcgtgaaaaaagtgaaggttctctccggtggtgaaaaaggccgtatgctttacggcaaactgttgctgttgaaacccaatgtcttagtcatggacgaaccgaccaaccatatggacatggaaagcatcgaatccttgaacatggcactggaaaaatacaacggcacgctgatttttgtctcccacgaccgtcagttcgtttcctccttggcaacccaaatcatcgaactggacggcaaaggcggatatgaacactacttgggcgattacgaaagttacttggagaaaaaaggcgtagcataaccgccggttggaacaatgccgtctgaagccgcttcagacggcattgttgataactttaaaataggaagcatatgcagacttatctcgtcggcggtgccgtccgcgattatcttttgggcttgcccgtcaaagaccgcgattgggtggtcgtcggcgcagacgcacaaaccatgctggcgcaaggcttccagccggtcggcaaagattttcccgtgtttctccatcccgaaacacacgaagaatacgccctcgcccgcaccgagcgcaaaaccgccaaaggttacgtcggtttcagtttccacgccgacaaagacgttacgctggagcaggatttgatgcgccgcgacctgaccatcaacgcgatggcgcaagatgcggacggcaagattatcgaccctttcggcggacaacgggatttggcggcaggcattttgcgccacgtttccccagcctttgccgaagaccccgtccgcatcctgcgtactgcccgctttgccgcgcgttacaagtttgaaatcgccgaagaaaccataaagctgatgcggcagatggtggaaaacggcgaagcggacgcattggttgccgaacgcgtctggcaggagtttgcgaaaggtttgatggaaaaaaatccgcgcaaaatgattgaagtgttgcgcgaatgcggcgcgctcaaagtcttgctgcccgaagtcaatgccctcttcggcgtgccgcaacgcgccgactaccatcccgaaatcgacagcggcatccataccctgatgacgctgcaacgcgccgccgatatgggcttgagcctgcccgaacgctatgccgccctgctgcacgacttgggcaaagccaaaacaccgtccgacatcctgccgcgccaccacggacacgacctcgccggtgtcgaacccgtgcgcgaagtcaatcagcggctgcgtgcgccgaaacattgcgccgagcttgccgaattggtttgccgttggcacattattttccaccaagtcggacagcttaaaagccaaaccattctgaacgttttgaaaaaaaccgacgctttcagacgacccgaacgctttcagacggcattgaacgtctgcattgccgacacgcaaggccgtctgaaccgcgaacacacgccctacccgcaacgcgcgcactggctcgccttactcgaagccgccaatcaggcggattcgggcaaaatcgccgccgaatgccgcgcacagggaaaagcgcaccttatcgccgaacaaatcgaccgggcgcggctggcacaaatcgccccattgcaaaaagcgtttcgagcggcgcaagacaaaacagaaaaacattaaaacgtccaatgcagccacttttatagtggattaacaaaaatcaggacaaggcgacgaagccgcagacagtacagatagtacggcaaggcgaggcaacgctgtactggtttttgttaatccactataaagttttgaggacgatacccaatccaagctttgcaacagccgccgccatatccgctataattcacgcttcagccattccgcccccgacataaaatcatgaccctgaaaaccgatttattgcctaaaatcaacaacgaagattatcaacgcctcatcctcaaacacagtgcggaatttagcggtggcgaaatccgcctgttgaacgaaatcctcgaaaaattcaatttcgacgttgttcaggcgcaggcattggcgcaagccgtcatgcagcaaatccgcttcgaccccaacgcctaccacatcgacagcgacgacgaagacaccaccggcatctgcccccactgcatcaacccgcctatgccgcccctgcgcgactatctcgtttggcgcgaaacccgcggataaaacgcttttgaccgttatcttttcaatgccgtctgaaacgccgccgaccgttcggacggcatacccgacaaagggaacactatgctgcaaaccgacaacctgaccgccgcgcaaccgcaacgcatcgttgccgcccaaaccgcctccgcacaggaagaactgctcgaacgcgccctccgccccaaaacgctggacgactacatcgggcaagacaaagccaaagaacagcttgccattttcatccaagccgccaaaaaacgcggcgaagcactcgaccacgttttgctcttcggcccgcccggactgggcaaaaccacactggcgcacatcatcgccaaagaattgggcgtaaatttgcgccaaaccagcggccccgtcctcgaacgcgcaggcgacctcgccgcccttttgaccaaccttgatccgcacgatgtattgttcatcgacgaaatccaccgcctcagccctgttgtcgaagaaatcctctatcccgcgctcgaagactaccggctcgacattatgataggcgaaggacccgccgcccgttccgtcaaaatcgacctgccgcccttcacgctcatcggcgcgaccacccgcgccggtatgctgaccaatccgttgcgcgaccgcttcggcatcgtctcccgccttgagttttacgaaaaccgagaccttaccaccatcgtcagccgttcggcacaactgttgcagctcgatatgtccgaagaaggcgcggaagaaatcgccaaacgcagccgcggtacgccgcgcatcgccaaccgcctgttgcgacgcgtgcgcgatttcgccgacgtgaaaaacaacggcacaatcgacggcggcatcgccgatgccgctttaagtatgctggacgtggacgcgcaggggctggacgtgatggacaggaaatttctcgaagccgttttgcacaaattcggcggcggcccggtcggtttggacaatgttgccgccgccatcggcgaatctacagacaccatcgaagacgttatcgaaccctaccttatccaacaaggcttcctgcaacgcaccccgcgcggcaggatggcgaccgaacgcgcctacctgcatttcgggctgcccgtcgaaaaataacgcaatgccgtctgaaacagagctaattttcagacggcatttctatttcaatcattggcgcaaggttcagcctgccgcttttttccagttccgccctcatcgcatcaatcaccgccttatagtctggtttgccgaaaatcgcagaaccggcaacaaaggtatccgcaccagctcgggcaacggcggcaatattgtcggttttgatgccgccgtccacttcgatggcgatgtgccgcccgctttgtgcttcgtaccgatccagcatcgcccgcacccggcggattttttcaagggtgtgcgggatgaagctttgtccgccgaatccggggttgaccgacatcagcaaaaccatatccagcctgtccaatacgttttccaacagatatacgggcgttgccggattcaacaccagccccgcctgacagcccatatcacgaatcaggctcaagctgcggtcgatatggcggctcgcctcgggatggaacgtgatgattgatgctcctgctttggcaaacgactgaatcaggtcgtcaacgggttcgaccatcagatgcacatcaatcggcacgcttgcataaggcttcaacgccgcgcaaaccatagggccgaaggtcaggttcggcacataatggttgtccatcacgtcaaaatggatcagatctgcacctgccgcaatgacgctttccacctcttctccgaggcgggcaaagtctgccgataaaatgctgggtgcgatacggtaagtagtcatgttttttccttcaatatccttttatagtggattaacaaaaatcaggacaaggcgacgaagccgcagacagtacagatagtacggaaccgattcacttggtgcttcagcaccttagagaatcgttctctttgagctaaggcgaggcaacgctgtactggtttttgttaatccactatacgttccgattccgccgttatgtctgcctgccggacatacgtacgcattattaacaaaagttaaccgcgataataccatctttcacacgtcaatctagtatatttcctaaaatttccaacaagaggaaaagccgtgccactgcctgctccctgccgttttgccaaacctgccgcctcttttttaagtatggctttgctttcctgtcagctttcccacgccgccacggcttatatccccccgaacgattttcaaccgaactgcgacatacgccgactcgggctgacccaaagtcagcacaatgagctgcgtaaaatccgcaccgccttcaaaatggcgggcgacagggcgcgtttgaaggttatgcattccgaacacagccgccgccggtctgtcgtcgaaatcatttcctcggatgtttttaatcggaacgaggcgcgcgattatgtcgaaagccgctatttgtccggtatggattttgcggtggacgaattggaaatccaacaccggttcttccatatcctcacaccgcaacagcagcaaatgtggctttcttcctgcctcaaataatccccgaaacgctcacaacgcccgttgtttcggcagcctgcccgcccagtcgcaggcaaactgccacgcggaacgtcccgaacggctgccccgcgtctgcgcccactgcaatgccgccatctgtgcggtttcatcatacggcacgccgaaatcttccagccaattttgcaccgccgccagataatcgttttgatcgaacggataaaaactgagccacaatccgaatcggtcggacagggatattttttcttccaccgcttctttctgatggatttccccccgcatccccgtcgtaccggcattctcgtcaaaatattcgggcatcaggtgccgtctgttggaagtcgcgtaaaccaaaacgttggcgcaacgttgagacagaccgccgtctaacgcggttttcaatgccttataggtttcatcgccgctttcaaacgacaaatcgtcgcaaaatacgataaatttttccggacattccttcaaaagcgtcaacaggtaaggcaggccgattaaatcgcttttatcgacttcgatcaggcgcaatcccttatccgcatattcgtgtagcagggctttgaccagcgaggatttgcctgttccgcgcgcgccgctcatcaatacattgttcgcgggtctgccgacaatgaactgttcggtattacgcaccagcaattcggtttgcctgccgactcccgccagccttaccaagggaaaggtgtgcggatcgggcaagtgttccaaaaaaccttttttgcccgcactctgccagcggaaggcaagcgcgttccaatccgtatgcccgggttcgggcggaagcacggcatccaaacgccgcaaaacggcataggctttatcgagaaattcgttcaattccatctctgcctcactttgcatatctttgcgccatcagccgttcgacggtatcgacgattgcctgcgtattcggatcgatttcgatgttgatcctgtcgccgacctttctgctgccgaacagcgtccgttccaaagtttcgggaatcagatggacattgaaacggccgtcttcgactttgcctatggtcaggctgcaaccgtccaagccgacgaaccctttggtcaggatatagggtttgagttcatgcgggagcgaaaaccaaaccgtgcggttgaacccgtcccgttcgatttcgacaataggcacggttgccataatgtgtccgctcatgacgtgtccgccgatttcgtctccgaaacgcgccgcccgttcgatgttgacgcaatcgccttccttcagcagccccaaattggtttttgccaaagtttccgccattaaatcgaaactgacgcggtttccttcgatttcggtaatcgtcaggcagcagccgttattggcgaccgatgcgccgcgttgcagattgtccgccgcctcttgcggaagctcgacgacataagtgtgaaatgcctccgacgggcggtggattgccgtcagttttcccaatccttgaacaatgcctgtaaacataatcctgtttccctgtgtcggtaaaaatggtgcaaattgtagcatctccccgcgaaaaatgccgtctgaaatgccttcagacagcattatgcctccgattcgggcaaaaaccgcccggtatggcttgacctttcctttccacgccggtcggcggtcttgcccttatccctcctgcaaatcgatttgcgtgttcaagtcggcaaaatgcccgtcaaactcgaatctgaccggccgcgccctttgctgctgcaaccagcttcttaatgttttcatacccgaaaacagatagggaatcgcgctttgcagaatctgcgggcggatatacataatgttgtagtgcatcgttatcggcgtttccacataatacgcattgcacaacggtgtgcgtttcgacacggtttcaaacctcgccaccaaatcgtccggcagatacggcatatcgcacggcacaaccaaaagccagtcagcagccgccaactgcaaatcgttggctgcggtacacaatgccgaaagcgggccgaaatgctgccactgccgcgcatcgggaaaaatatgcggacttcttcgagcatattcttccaaattccggttggtgctgatggcgatatggctgacctgcggcctgaccctgtcgatgacatggtctatcagtgccttacccccaaaagagcaagccctttgtcctcgcctcccatacggctcgcctgaccgccggccagtatcagggcaaaagttttcattgcggatgttctcttggaaaagttcgaggttttcatgattgcagtctgccgttcccaatgactcaaaatgccgtctgaagcagacggcaaataaattcatattatctgaattttatcataacatgatttaacactgaagcggtgcggattaagttttccttaaccaattctttctgagcagttgtatctaattccaaagaatgatattgtttgcattatttggaacaatttttcgccgagcatgatactgccagcccgtttttcagacggcatcagcctttccctgcgcctgaaactcctgaccggactgtgggtcgggttggcggcattgtctgtcgttttgacactgctgctctctttgcgtctggaaaacgcggcctccgtcatcgaagaggcgggcaacttgagaatgcaggcataccgtctggcatacatggcgggtgaaggctcgccccgtgcgcaaattgacaatcaggttgccgaatttgaaaaaagtttaaaacgcattgcccaaagcgatgccatccatccgctgattccttcggacacccctcttgcttatgatttgatacaatccatgctgattatagattggcaggcacacatcctccccccgctccagtcctaccggcgaccgactcaggtcgatctctaccgctttgccggaaacatcgaactgtttttgcaggcattggaaaatgccaacgaaaaaaacacatggtggctcaggcgttttcaatgggcaattatgttgatgacgctggtgtcgtctgtactgatgctgttttggcaccagatttgggttatccggccgctgcaggcgttaagggaaggtgcggaacgcatcggacggaggtgtttcgatattccggttcccgaaggcggtacgccggaattcaaacaggtcgggcgttgtttcaatcaaatgggcggcaggttgaaaattttatatgatgatttggaaggacaagtcgccgagcagacacgcagtctcgaaaaacaaaatcaaaacctgaccctgctgtaccaaactacacgggacctgcaccaatcctacataccgcaacaggctgcagaacattttctaaaccgtatcctgcccgccgtaggagcagattccggcagagtttgtttggacggcggatccgatgtttatgtttccattcatcatgcggattgcggcacagcagcttcggatttggggaagtaccatgaggaaatcttccccattgagtaccagaacgaaacattgggcaggctgttgctcagctttccaaacggcatttctcttgatgaagacgaccgcatcctgcttcaaacactaggcaggcaattgggcgtatcgcttgccggcgcaaaacaggaggaagaaaaacgcctgcttgcagtattgcaggaacgcaacctgattgcgcaaggattacatgacagcatcgcacaagcattaacgttcctaaacctacaggtacagatgctggaaaccgcctttgccgaaaacaaacgggaggaagccgcagaaaacatcagctttatcaaaacaggcgtgcaggaatgttatgaagatgtccgcgaactgctgctcaacttccgtaccaaaatcagcaataaagaatttcccgaagccgttgccgacctattcgcccgctttacgcaacaaaccgggataacggtcgaaaccgcctgggaaaacggttcgttcctgccgcctcaggaagcgcagctccaaatgatttttatcctgcaggaaagcctgtccaacatccgcaaacacgcccgcgccacccatgtaaaattcaccctttccgaacacggcggacgctttaccatgaccatccaagacaacggacaaggtttcgacacggagaaaataggagaacccacgggcagccatgtcggactgcacatcatgcaggagcgtgccaaacgcatccatgccgttttagaaatccgttcccaagctcaacagggaaccaccgtctcattgacggttgcatctgaagaaagcttgaaatgactattaaaattattctgatagacgaccataccctcttccgcagcggcattaaagcccttttgtcgcgccaacacggttttgaagtcatcggcgaagccgcagacggcctctcgggtatcaaaatgatcagtcggctgcaacccgatgtcgtcctgcttgaccttgatatgcccggtatgaacggacgcgaagcactctcccaaatcatcagcatcaatccgcagcaggcagtgattatgctgaccgtttccgaagacagcgacgatttgaccgaatgtatgcgcatcggcgcgcgcggctacctgctgaaaaacatcaacgccgactttctgctcgaaagcatacgcaaagccgctgaaggcgataatgtattctcgcccgagatgaccgccaaactcgtcaaaagcctgatttccccccaacctgcccaagggacgcaggcactctcctcacttacccctcgtgaactggaaatcttgggctatctcgccgcaggacacagcaacaaaatcatcgcccgccacctcgatcttgccgaatccaccgtcaaagtccacgttcaaaacctgctccgcaaactcaacctcagcagccgggtgcaggccgccgtttacgccatccggcacaacgtcccccaacctgtgccggaataggcgttcagacggcatattaggggttttaatccccgtacggtcattcggataacagaccaagcatgtaagtttatgcccccataagtacgcttggcatagcagtaatattgttcggtttagtgttttccgtttgcccctatctgatactgcaatatcagctatgccgtctgaaaacgcatcatcatgatattttcagacggcataataaaaagcggaaatactaatgcagggtaaaatgttccattccgaatcccataaatatacaatggcttatatcgtttaagcatgtgtaacccaccctcatatcaatcaatatatagtggattaacaaaaaccggtacggcgttgcctcgccttgccgtactatctgtactgtctgcggcttcgtcgccttgtcctgatttttgttaatccttggattcggatttcaagtgcaacactagtgtattagtggttggaacagattcaagaataaaacacttggcgtttcgtagccaagtgtttttcttggtcggtggttcaactcatcttgaaccctgcgtatctcccgatcactgatgttacggaaatcggtttgtttggggaagtattgccggatgagtccgttggtgttctcattcagccctttctcccaagaatggtaagggcgacaaaaataagtctccgctttcaatgctttggttattttggtgtgttggtagaactctttgccgttatccatggtaatggtgtgcaccctgtctttatgtgcctttaatgccctaacagctgcccgggcagtgtcttcggctttgaggctatccaatttgcagatgatggtgtagcgggtaacgcgttcgaccaaggtcaataatgcgcttttctgtcctttgccgacaatggtgtcggcttcccaatcgccgatacgggatttctggtcgacgatagcgggtcggttttctatgccgacacggttgggtactttgcctctggtccatgtgctgccgtagcgtttgcggtagggtttgctgcatattctgagatgttgccacaacgtgctgccgttgcttttgtcttggcgaaggtagcggtaaatggtgctgtggtggagcgtgatctggtggtgtttgcacaggtaggcgcatacttgttcgggactgagtttgcggcggataaaggggtcgatgtgctgaatcagctgcgaatcgagcttatagggttgtcgcttacgctgtttgatagtccggctttgccgctgggctttttcggcgctgtattgctgcccttgggtgcggtgccgtctgatttcgcggctgatggtgcttttgtggcggttcagctgtttggcgatttcggtgacggtgcagtggcgggacaggtattggatgtggtatcgttcgccctgggtcagttgcgtgtagctcatggcaatctttcttgcaggaaaggccgtatgctaccgcatactggcctttttctgttagggaaagttgcacttcaaatgcgaatccgccatcctctataaaaatgccgtccaaacccatgtttgagacggcatttcgctatagaagcaatcaggcaacctgggtttgatgctcgtctccctgacgctcacggatcaaacctaaacggtaaactgtttcaccttgttcacccaagagaccctgaaccgcatcggcatcttcggcagcaacaataacgaccatgccgatgccgcagttaaaggttcggtacatttcttgggtttccacattgcccgccttttgaagccattggaagagcttgggcaattcccacgatttagcatcgatttgtgcaaccgtgttttcaggcaacacgcgcggcacgttttcggtaatgccgccgccggtaatgtgtgccatacctttaatggtaaatttttccaaagcggcaagaatcggtttcacatacagacgggtcggcgcaataacagcctcccgcaaggttttgccattatcaaactcggcatccagatcgggattgtcgcgttcgatgattttacggataagggaatagccgtttgaatgtgcgccgttggaagccaaacccaataccacatcgcctacgccgatgctgcggccggtaatgacattctctttttccaccacgccgacggcaaaacccgccaaatcgtattctccgacgggatacatacccggcatttcggcagtttccccgccaatcagggcgcaaccggattcttcgcaaccttgggcaatgcctttaataacatcggtcgcgcgcggaacatccaatttaccgcaggcaaaatagtccaagaaaaacaagggctcagccccttgaaccaaaatatcgttgacactcattgcaacaaggtcgatgccgaccgtatcatgtttatcccaatcaaaggcaagcttgagcttggtacccacgccgtccgtaccgctgaccaatacgggattttgatatttcttgccgatttcgaccaatgcgccaaaaccgcccaaatcccccaatacttccgggcgcatcgtgcgtttggcaaacggtttgatgttttcgaccagttggtcgcctgcgtcgatatcgacacctgcatcgcggtaactcaatgaagtactcatcgtttttccttggtaaatggggattggacggtaaaataacggggcgtattctaccttatttcacgtttgcaggttcagatttttagacaatattgtaaacagtccgccatatgcccgcgcgtgtcgggtttggcgggaccgtccgcaggattaacgggcagaaacccgcctgcccttcccctcaattccttatatatcgcgttccatcaaaagacgcattgcttttcttaaccattccttttggcagacgagcggaaggggttttttgatgccatcatcaaaatcaatattttcttctttccggttgaaaccccggcattaggggtggtgaatctgattgcgtgcggaagcacccgtttccgattcggtgcggaacaaatggcggcactttatgtaccgttctgcgtgttgaaacatataggcagataaaaaagccgcccgctgaaaagcagacgacttatgttttgtggcactaatttgtcccgataagcattaactatataatttatttatcattattggtgcggacggagagactcgaactctcacacctctcggcgccagaacctaaatctggtgcgtctaccaatttcgccacgtccgcatgggaattggacgattatacagattttgtttttttgtgcaaggttttcggcggggctgttgatggcttggggtttggggcggtaaaatctgtttttcgtccgcctgacatcggaatcgggcggttttttgtttttattgacggaatttgggtatgcctgctgctttgattaaggattttctgctgactcagggtttgaagctgccgcttgacgaggttcgggcggcgtatctgacggcgcagacggtaatggatatggggacggcttcgatagaccgttcggttttgtggcgcagtgatgagggttggaaacttgccgattacctgtcgtgcgacaatgtccgcgaagatgcactgaaacggcttttcatggctttggattcggtgttttcgcgctcgacaggcgtgcggagtgcggcggtctatgccttgatgccatctgaaaaccaggctttccaactgatatgcctgtcccgacagggcgaggttttggaaaacctgtgggatttggatgaagcggcaggcaaggtttcgctggcttgccgttcggcgcaaagcggttggatgaatgttgcctcggatgtacgccgttggttggatttgggggagctttcgggagaacgcaatcatgcttcggcggcgcaaatttccattccggtctgcacggaaagtggcggtgtgttgggcgtggttcatgtggaatttgaatgcgcagagtgtgcgggtacggcagcacaggtggaatgggtggctcttgccttggctttgtccgaacctttgaaactgctgttgggtatgtctgccggaaaagatgggagtgaagatgtctgaaatgttgaaccatgtggcatcctgccgcctgccgaccgaatggggcgtatttacgatgcacggctttgaagaggcaaacgggcaggaacacgtcgcgctgaccgtcggtaatttttcagacggcaatccggttctgacgcgcatccactccgaatgcctgacgggcgatgcgctgttctcgagaaaatgcgactgcggacctcaacttgaagcggccatgagggcggtacagacagaggggcgcggcatcatcgtctatctgcgtcaggaaggacgcggcatcgggctgattaacaaaatccgcgcctatcatctgcaagaccaaggtatggatacggttgaagccaatttggcactcgggctgcccgtcgatgcccgcgatttccgtttggcgcaatctatctacgaatatctgggcatccgctcggtcaaactgctgaccaacaaccccgaaaaaatccaaaccctgaaagatgcggggattaacgtggtcgaacgcatccccctgcacgtcggggaaaaccttgaaaacaaacgctacctccaaaccaaagcagacaagctgggacatctgatgtcggaataaggcaaagttgcagggaacgggcatcctgcgccgcctttcgggaaacaggtttccataccttgataaagcaataagttttatagtggattaacaaaaaccagtacagcgttgcctcgccttagctcaaagagaacgattctctaaggtgctgaagcaccaagtgaatcggttccgtactatttgtactgtctgcggcttcgtcgccttgtcctgatttttgttaatccactatataaagttacagggtgcggatgcaaacgcattgcgagcgcgggtttgaggcatacgcgcaaacatcttaatataatggattgatatttatgattttctccatcatcgtccctatttacaatgtggaaaatacctccgctgctgcgtggattccgtgcttgccgaaaattttgccgattatgaaatgattttggtcgatgacggttcgccggacggctgcgggaagatttgcgacgaatatgcaggcaaatatccgcatataaaagtgattcatcaagaaaacggcgggctgtcggatgcccgcaacgccggtatccgggcggcaaaaggcgattacctaatctttttggacagcgacgattattgggccgataccaaccgttcaaaaaacgcggggggggattctctttgatttacaacaacttgcagacaaaaaggttgatttgatcctgcatccctcgtccttcaattaccgcgacatccccaaaggggcggacttttcggataatgattttgtccgccattttgaaacgctggtggaggggcggtactatatcgccaacgcgtggacaaagattgtcaggcgggaaatcatcattaaaaacaatctgtttttcccaaaaggatacattcacgaggatttcccgtacagtttgcaattggcgcgttttatcaagacttttgccttttacgataaccctttttaccagtaccgcgttctcggcggctctatcagccacaacatcaaatacaaaaatttcagcgatgtgctgacgcatctcgactggggtgtggattttttagtcgaaaacaaaaattcccccatctacggcggtttgcaaaaatttgtcttcgacaatatcggctatctgaggtctatattggtaaggctttatttttccaaaaacattatcctcatctaccggaaatatttttcatttaaagaaaaatgcagaaagatattcggcgcgaaggcaatccgtccggtttttatcgggaagaccgcattcatcataggattgccgatattgcgcctgctcgtaccgcctatgctgtacccggcaatcaaggccgtttatcagaaatttttttcggaataagcttccggcaaaccccgaatcggaagcgggcgggaagaaacagccgccccgccggcggggattgcggcaatgccgtctgaagccacgaatccggcttcagacggcatctgtttaccaaaaagcaaataattcggtttggcgaaaaaaacagatttgctttttggtaaatacgcgattacaatccgctacatccgatttctacaaaggatgaaacgatgaccgacacagccggtctgcgccgccacaacctgcggcagtggatagaaaaatactacggcggtttgcaaactcgttttgctgaagccgttgccctcaacacaggcgaactctccgcccttttgaaaaacaaatccttcggcgagaaaaaagcccgtaaaatcgaacaggcggcaaaaatgcccgccttttggctcgataccgaacacaccgcccgcccgtccgaacacacaggaaaacacaccatgtcccatatctcccccatccccgaaatcctagccgacatcaaagccggcaaaatggtcatcatcaccgatgccgaagaccgagaaaacgaaggcgacctgctgatggcggcgcaattcgtcacgcccgaagccatcaacttcatgatcaaacacgcgcgcggcttggtctgcctgccgatggacggcgaaatggtcgaaaaactcgggctgccgatgatgacccaaaaaaacggcgcgcaatacggcaccaactttaccgtctccatcgaagccgcacacggcattaccaccggcatttccgccgccgaccgcgccctgactattcaaaccgccgtttccccgaccgctaaacccgaagacatcgtccaacccggtcatatctttccgcttcgcgcccaaaaaggcggcgtactcgtccgcgccggacacaccgaagccggcgtcgacctggcgcaaatgaacgggctgattcctgcctccgttatttgcgaaatcatcaacgacgacggcacgatggcgcgtatgcccgaactgatgaaattcgccgaagaacacaagctcaaaatcggcacgattgccgacctcatcgaataccgcagccgtaccgaaagcctgcttgaagacatgggcaatgcgcctgtacaaaccccgtggggcgagttccaacaacacgtttacgtcgacaaactctccggcgaaacccacctcgccctcgtcaaaggcacgcccgccgccgacaccgaaaccctcgtccgcgtccacgaacccttcagtgtgatggacttcattcaagccaacccgcgccattcatggtcgctgcccaaagcccttgagcacatccaacaagccgaaagcggcgtcgtcatcctcttacaccgcaccgaagacggcgcatccctgctcgaccgaaccctacccaaaggcgcaaaccaagcctacaaatgggacagcaaaagctacggcatcggcgcacaaatcctcgccggcctcaacgtcaaaaaactgcgcgtcctcgggcagccctcatctttcaccggcctgaccggcttcggtttggaagtcgtcggctttgaagaagcggaaaaataatatagtaaattcaaatactttatatttgctttatttattgcattatttccgtgcaaacgaaaacccggtctgttgggttggattttgttttttcaaatttcgggtaacttctaattcgtcattcccgcgctggcgggaatccggttcgtcgggtttttgtcatttccgataaattcctgtggctttggttttttggattctctctttcagggaaagaacggcataagtattttccaaaccaaacaaaatgccgtctgaaaggctttcagacggcattttaagtttgaccggtttcattcatcggtatttatgaattgaatttcaacatcgccaatctatccttaatctctttttccaattcggcagattcggcgaaaagtttatccaaatccgctgaaaatcccgccattttttgcgcaaattcgtcggcggaaatatccacataatcaatctttacctcgaaatactgccccgccgacaagctgtgattcttcgctttgatttcatcgtagccgattaccacactgaaatcttccactgcctgtttgtgcgtgaaggtattgcagatttttttgttcttcttcgcgggaaagtacggtttttttgccgtctttaattttttcgcccaagcccgatgcgtcgattaatatagtggattaacaaaaatcaggacaaggcgacgaagccgcagacagtacaaatagtacggaaccgattcacttggtgcttcagcaccttagagaatcgttctctttgagctaaggcgaggcaacgccgtactggtttaaacttaatccactataccacgttgtctttattggctttatcaataaacaggataagacctgaaaaaaagccgatacgcctttttggtgtaccggctttgccatactgttctgcttcagacagcattgcttcattttgcctttaatacttcttcgtccagcgatttcaaccattccagcttttcgccgattttgatttccaacccgcgcgggacgggttggtagaagtccggttcgtccaagccgtcgggcatatagctttcgccggcggagtaggcgttcggttcgtcgtgggcgtagcggtattcgcgtccgtagcccaattccttcatcagcttggtcggggcgttgcgcaggtggacgggcacttcgtcgctagcgttttctttgacgaagtggcgcatttggttgtatgccttgtagcccgcgttggatttcgcggcggcggcaagatacaataccgcttgcgccaaagccagttcgccttcgggcgagcctaagcgttcgaaggtggcggcggcatcgttggcgatttggaaggcgcgcgggtcggcaagcccgatgtcttcccaagcgatacgcacgatgcggcgggcgaggtagcgcgggtcggtgccgccgtcgagcatacggcagaaccaatacagcgcggcgttcggatgcgaaccgcgcacggatttgtgcagggcggagatttggttgtagaaactctcgccgcctttgtcgaaacggcggatttgcgccccgagactgtcggcgagaaattcggcggttaagtttttcagacgacgtgtatcggcggcgcgtaaaagttgttccaacaaattcaacaatctgcgcgcatcaccgtcggcggtattcacgagtaatttttgcgcatccgtttcaatcgtaaactcttggtattcaggcaaagccaataccttggcaatcagctttttcaggtcgtctgaagacaagggttgcaaaacatacacctgagcgcggctcaacagcgcgggattgacttcaaacgacggattttccgtcgtcgcaccaataaaggttagcaaaccgctttcgacatgcggcaaaaacgcgtcctgctgcgccttgttgaagcggtggacttcatcgacaaacaaaatcgtcgcgcgtccctgctgcaaagcgatttcggctttatcgattgcctcgcggatgtccttcacgccggaaaatacggcggaaacaggcaaaaactgggcgttgaaactctgcgccaaaatccgcgccaacgtcgtcttgcccacgcccggcggcccccacagcaacatagaatgcggcttgccgccttctaccgccacgcgcaaaggtttaccttcgccgatgaggtgttcctgccccaccacgtcgtcaagcgtatgcggacgcaatcgttcggcaagcggcgcgtcgggttctcgggcaaacaaatcggtcataacggctccgtcaacaggttttcaaacaatatgattatacggcagggaacggcggcgtgccgcatacggattccgcccctccgtttgccttaagccgatattaggcgcatactggaaaagacgagagacttcacacaatatatccggcacggagaccgattccgcatcggcatgacaatacccaaatcagcgtttcaattaaacattaaggagactaaaatagaaaatttgctttatctaccattgctttgttgatttaatcggcattatgttttgaggcggaagcccatgaatatactaatattcaagagatggaatgggtgtctttattttctgatccgcaaagagacgatgatagtcttataacccttaaagatgaaaaaatcactgtaaaaaactatattgtgccttggtggaaaaaaggtgaaaactttagaaaattagaacttggcggattcgcatttgaagtgcaactttccctaacagaaaaaggccagtatgcggtagcatacggcctttcctgcaagaaagattgccatgagctacacgcaactgacccagggcgaacgataccacatccaatacctgtcccgccactgcaccgtcaccgaaatcgccaaacagctgaaccgccacaaaagcaccatcagccgcgaaatcagacggcaccgcacccaagggcagcaatacagcgccgaaaaagcccagcggcaaagccggactatcaaacagcgtaagcgacaaccctataagctcgattcgcagctgattcagcacatcgacccctttatccgccgcaaactcagtcccgaacaagtatgcgcctacctgtgcaaacaccaccagatcacgctccaccacagcaccatttaccgctaccttcgccaagacaaaagcaacggcagcacgttgtggcaacatctcagaatatgcagcaaaccctaccgcaaacgctacggcagcacatggaccagaggcaaagtacccaaccgtgtcggcatagaaaaccgacccgctatcgtcgaccagaaatcccgtatcggcgattgggaagccgacaccattgtcggcaaaggacagaaaagcgcattattgaccttggtcgaacgcgttacccgctacaccatcatctgcaaattggatagcctcaaagccgaagacactgcccgggcagctgttagggcattaaaggcacataaagacagggtgcacaccattaccatggataacggcaaagagttctaccaacacaccaaaataaccaaagcattgaaagcggagacttatttttgtcgcccttaccattcttgggagaaagggctgaatgagaacaccaacggactcatccggcaatacttccccaaacaaaccgatttccgtaacatcagtgatcgggagatacgcagggttcaagatgagttgaaccaccgaccaagaaaaacacttggctacgaaacgccaagtgttttattcttgaatctgttccaaccactaatacactagtgttgcacttgaaatccgaatccaagggcattttaaaatcccgaagcagacggcacgcgccccgaacattcgttctttaacgcccgttttcagaatgcccgcctgcgggcatattttgcccgatcagttcggctatcctctcgccgtcaaactgcgttttgaacaccaccttgatttctttggaaatctcggcaaacagcttttcggcatgtttgattttccgctcttcgctttttcgcaaatcttccgccccgtcagtccctttggcttcaatcacaaagttcaggatctcgccgcttttggttttcacgatataggcaaaatcgggcgaatacgtgccgccgccggcaacagggattttgatggagtttctcggtattttggtaaatacgattacgccttcaatttggttgttggcgacattttcatgttctatatccgaatcgtagaaaatctcgccgaagagatagccggcggcaggccggtgctccgtatcttcaaatctgcccaaatctgcttttttcaccgcgcgcggtttgccgtctttattggtaaatttggtcggatggattttgctgccgacaagccggtaatccagttcgaatttatggaaggaatgatgaagcaaaaaccggttgaagccgtttttgatttgggcgatggtttgcatattcaaaaaatcgccaatgttcagttcgttgcggatgcagtaaaacgcctgatgcaaagtctgcatacggatttttgccgtttgtgccagtttttccagaaactctcggtaagtcattgtgttgaaacggataaaatcttcatcttcaaaactgtctatgcggcgggaaagcataagcccgttgttgatataagcttcgtttaccgccgtgcgtatgcctgcctgtgggaatttggcagcgttttcatgcaaataggcggtaaataaatcggcaaattcggcttcatccttgattttatactgcaaaacggctttatggtgaatcagctcccacaaggctttgagttcttcatatttgccttcgcgcatgatgatggtgtctttgccttcgtctttggcgttgctgactttgcctttgtccaaacctttggggaaggcttcgggataggcggcttttaatttgtcatagccgtcttcggcaaagttttcattgtcgtcaatgatgccatctaaaaacagttggtttaccaataccagcggtttgatatcggggtatttttgcaatattttttgtttcagctcttcggtaaactttttggagatttcttcctgaaaagaattgtcgttgatttcgccgacaagctgcttcacaaagtctttttcgctgctatcgacaaaataattcagtttgtacggtacatcgcgcacccgcgccatcagctcgtttaccggcaggcgcaggccgcgtccgacttcttgcagcttggaagtcgtgctgccgctggaacgcagtttgcaaatctggaaaacgttgggattgtcccagccttcgcgcagcgtccatttggaaaaaataaagcggcgcgggttgtccaaagacagcagtttttccttatcgtgcaggatttcattgatttcctgctcgattctatcgtcgctgtctgtattgtctttggaaaaatagccgccgtggcaggcggatacatcgtccaacgtcttttgcaggtaatcgcggtaaaacgggtcgctttccgttttcagacggcgtgccgcttccgcgcgaatccagctttcaaatttatctttcaggctgcctgaaagctcgttgccgctgcggtagcccgcgatatcgtcaataaaaaacagcgtcagcggcttgattttgggctgtggcgcgcgttctgccaaaagcgcgcgttccagcttgaaatgttcggcaaccgcccgctgcatcatcgcatcctgcaccgtttgcgaataggaataagggttgatgacggcacccgttttcaactccaagccgttgcttaacaccaccacggttttattcattttgtcgattttcaaatccgaaatagccggatggatttgcgccaaatcttcgccttttgccagtttgaacgtctgctttttgtccttttcgtttaattcaaatttcgcttctttgccgtccgacgacaccagttttaccgccgcatccatgccgccctgcatttcttcctgaaacacgcgcacgcctttgaccagcccgtcgttaaacgcgtctactgccgtcaaacggtaaagcaagttgtaatattcatcgttaaatgttgcaccgtagcgcaaaatatattgcggttttaagcgtttgatattgccccacgttttcgcgctatctcgggtcgggaatttatgcggttcgtccacaatcataaacgggcgcacggcagccaatgcatcaacgggattgtcaaacaaatccttcaatgccttgtcgcccgtatcgttcatggacgacgaattaaccatgcccgcgttaatcagcagcacatgaatttcctttttgttttccgctttgacaaattgctcaatcgttatgggcgcattggactttttgcccttattctttttcgcgctttccaccacataggttttcaggcgtacgccttcataatcgccgccgaaatcctgttcaaaatgctctgccaaagccttgctttgcaaaaactgctgtgttcccgccttaatggacaaagtcggcacgaccacgataaatttgaacacgcccagccaacggtgcagctcgaacatggtttgtgtgtaggtataggttttgcccgtgcccgtttccatggaaatatcaaggatattttggtcgtccgaacggtcggggaatcggccgtctataccgttttggctttgcactttcaggatattgtttgcgtattgttttgcagcaaacaaaagttcgggattttcgtctgccgtccgatatttgggcgttgccccgtcaaacacgcccaaaaccgccgaaaccgcccgcatttggtgcggctggtttttctcgtaattaaaaccgctcatgaattgcctccgtcaaaccctgataaccacattcaactcaatctcttttttattggcataaccgcgaaccgcctggtcaagttcgtgctgcatggcgcttgccatattgctgccgaatacaatcacgcggttgggattgaaatccgcatcgtcgtccagcttgcggataaacgccaacaaatcggcggaagtaaaaccggcattcatcagatacagccgtttttcgcacagatacgccgtgtaagcccctaaccgcacaggctcaaccggcgtggtcagtgccgccccgtcatacagcgtccaggtggtcagaagcgtttgcagctgttcttcgcttaattcatcgttaagcggcaaatccggttgttcgggcgaaaaatccttgtccggatgctgcctgaaattgtctgccgtttgaaagattttgaagcccgaatcgcccgtgtaatcgggatgttcgacgcggattttggcggcggctttttctatgcgggctttggtgatgtcgaagatggtcgggtagcctgctttacgggcttcggatttttcagcggttttttcgggaagctgtacacagatatagcggcggttaccgttttgtccttcggcgttaagctgcatcacggcgtgggcggttgtgccgctgcctgcgaagaagtctaggattaggtcattactctttgaacttattgaaactaaaaatttaatcaattgactaggcttggggaaggtaaatattttgctaccaaataaatctgtgatttcttttgtgccttctttagtcattccgatattttcaggtagcgtcctactaaaaatagccaaatattcggctactgcatcggctaatgtaccaacattttcaggtaatctactgcttacagctactttgccaaaatcctcgccagcttttttcatgtcgtcatctttaaagtaacgcataactggattgctgatatttaagaaatcataatcatcagggaaaacgatttttcctttattataataatcttgaaatgtatctttggttacacgccaagttgcatttggatttgctggatatttttttcctgtcttgggatcaaccattgtgaaaaaactatttggcctttccgccgcagttgtttgtttcgttaagtcgtgggtacgccaaggacgatcggggaaatcatcagtctcataatagcgtcgttccttgcctttagttgctgcaataaattggcaagattttgcgaatacaaatatccattcataatcctgcgaaataccaaaaggcacatctgatttagctgttctttttcgccaaggcaattgtgcaacaaaattcccttccccaaacacttcatcacacaacaatttcaactgcgccgcttcgttatcgtcaatcgagataaaaatcacaccgtcgtcctttaacagttcgcgggcgacatacaggcgcggatacataaaggtgagccatgcgctgtgcgagtttgagcctttgtcggtgaaatctaaaatccgcgcggcttcgtcttcatcaatattggctaggcgggcaagttcagcgggtgtgaatttgcggtcgtcctgatagacaaagccgtctgatccggtgttttagggcgggtcgatgtaaatcatcttcacgctgtttgtgtaggcgttttttaagtgtttcaacacttctagattgtcgccacgaatcagcaggttttggctgcctgcattttcgggcttggcgttgtgcgtcttgtcttcacttatcagggtttcgggcggcaggttgcgaagcaggcgagcatatgatttgcccagccagttcatttcgtaaaattcgcgtccgatgtcggtctgcggcgcgatttcggcttgtaatctgtcgataaggaaatttccgtctgcgtcaaaacaggcgggaaacagttttttgagctgttcgagttgggtagagttggcggtaatgccgtctgaagtgtagattgcctcagtgttcgccccggctgtgtcgcttagatcagggcttgggttgggttgggttgggttgggttgggttgggttgggttgggttgggttgggttgggttgggttgggttgggttgggttggcagcattttaaaatcctcggtttgaatttgtcaatatcaactgtctgttttaaaatatttttttactttaaacggcgttttttgggaaacgggcgacgccgtctgaacgtctgtctgcgtgttactgcccgacaacaacgcgacggattttgacgggctgtacgggtacgttttgataaaagccgcgcgtggcggttttgacgcgggcgattttggaaacggtgttcatgccgctttcgaccctgccgaaaacggtatagccgtattgtccgtttttgtagtcgagcgaagcgttgtccgccagattgataaagaattggctggtggcggaatcgggggctgtcgtccgcgccatggcgatggtgccggcggtgtttttcaagccgttgccggattcgttggcaacggccttatcgcttgccttttgtgccaagtcctcggtcaatccaccgccctggataacaaaaccgtcgataacgcggtgaaaaacggtgtcgtcgtaaaagccttttcgggcatagcgcacgaaattagcaacggttttgggggctttggattcgtccaaaaccaaacggatattgcccatatcggtttccatcaaaacatgggttgccgccatagacggcagggaaaccgccaaaagcagcgcggttaaaacggttttgaatttgggtttcatcccgtcctcctcagaccttcagacagcattttcatttcctatgccgtctgaaggctcgttaacgctattccaatgcgtctttgagtttttgttcgattaaatccgcatcaaacgatttggcaatcaattcaaaacgcgagtcgcgccgccaagacacttggttcgcaccccattgcccgtccacccagttgagccacacccacgttcccaatacttggaacacgcctttggcacggacgagtccttcggtcatattgggcaaatcattgaagaagttggtcaatttttcaccgtcgaaatcgcgtccggcggggaatgtgaaaccttgcgactggaagcccatcgtgttgtccggcagggctttgaggcggtagcgtgatttttcgatgacggggatgtcaagccattggatatcgagttgtgcgttttgaacttcgaccactttagccttgggcgggaacagttttgcggctttgtcgtgaaattcggcaagctgttcgggggtgcataaatcggttttgctggcaaccaatacgtcgcagatgccgatttggtctttatacaatgcctgctgcgcgtaatcggggttgatgaactggcgcggatcgacgacggtaaagactgcgccgatttccaaaaggctgtccagcggtttggttttcagttcatcaatgacactggcggcgtgcgccagtccgcttgcttcaatcatcaggcggtcgggcttggcgtcgcgcagcattttctgcacggttacgcccatttgcgggccggcggtgcaacacaaacagccgccggcgatttctgccacagggatgccgttgtcgctcaataccgcgccgtcaatgccgatttcgccgaactcgttgacgatgatgacccatttttcgttcgggtctttttgcgccatcaggcttttgagcgcggtggttttgcctgttcccagaaaacctgaaatcaggtggactttggtttttttcatttctatgtgatgtcccactttaaaatttgaagatagggtgttttaaatgattaaataatgttaaaagtgatggcagctgttatcatgttcttcatcaattgacaattgttccagcaaattcgatatatcggctgacatcgccggtatgacgttcaaaaccgtctcccaaacgacagacaggttcatttcaaagtagccatgggcaatcctattgcgcaataccccctcatccctatccaattcaaatatttggtttcctcggcaaattccggatacgatttaaggatatgggttgcgttttcaccgataaggaacaaattaaaaacgactgcctgcacagtctttgtgtcggcagaaaattgcccataatccattttgtcggtatatagccggatatattgcgctgcctgcaatatctgtttcaaatagaccgacaattctttctgcattttcataatgcgacagcctcagtcaacaccttatctctaaagtgggccgagatgtcatcgggtgtcagcaaatcgacctttatgcccaagagtttctgcaattcctcttgcagcccgcccaaatccaataatgttgtccctgtttttgcatccaccaacaaatcaatgtcgctgttttccgtatcatctccgcgagaaaccgaaccgaatacccttggattgcaaatcaatggatatttcccgaaaactgccaatatttctttctttctgctttgcaacaaaagagacggtttcattatctgctcctttcgaaaggcttattatcaatgcaaaccaccgattactgctgacattttttacaaatcccggttaaaacaacgtgttcttctttcagcgcaaagccgctttcggcaacgcctgcgcgcagtgccgcccactcgtggctcagggtttgctcgtccgccgtgccacattcggtgcagaccaaaataaacgcgctgtggtgcgcttcggcttcttcgtggtcgtggcaatggtcgtcgcactcgtgctgcgcgtggctgcacaaaatatagccgttgaccgccgccactttgtgcaaaacgccctgctccgcccaaaaatcaagggcgcggtaggcggtaggcggtgcaagcacgccctcgctttgctgctgcatctgcgacaagacgttgtaggctttaatcacgccgctttgctgcaagacaatatctaatacctgctcgcgcaaagcggttacctgcaagccttcgctgcgtgcctgttcgataattttctgtttgaaatttgttttcataaattctctgtttatgccgtctgaacaaccgatacggcaggaggcggttttatatttgtattcaattgctttatttggaaatcttttccaacaatgcccgacagcccgcatccgcaagcctgaaggtttcttcaaaatcgcccgtataccacggatcggggacatggtcgtaaccgctttcgggtatcaggtcggtcagcttgaatattttttccggccgcctgccgaaggttctttccaattcggacaaattcttgccgtccatcgcgatgatgcagtcaaacgccgccgcatcgctttggcggattttgcggctggtaaagcctgaagcatcgataccgtgttttttcaatatctttgccgtctcgcggtgcatatcttcgccgtcgtgccagcccgatgtccccgcgctgtccgcttcaaggggaatgcccgcttcggcggcgcggcggcgcaaaatgtattccgccatcggcgaacggcagatgttgccgaggcagacaaaaaggattttcggttttttcatatcccctccctgttccggcgcgatgccgtctgaagcggaaaccctttcagacggcatcggtcggttaatcgtaaccgcataaggcagaaccagccaaaacatccatctggaagaaatggtttggctaaatcttaggcatatttaataagtgtccaatattagaagccgtatgctccaaatagaggctggcatttttcaaactatcttctaaaggttcacttttctccaaaatagaaaaggcagcttggatattttcaaatggcagggaaggcaaatcttcaacgagactgccacaaatagcgacaacaggaactccgacaggggttctttttgctacaccaataggcgctttccctgctaaactttgacgatctagtcttccttcaccaacgataaccaagtcaacatctgacactttcttatcaaagtcaatcaagtccaggcaggtgtcaattccagatacgatacttgcctgagcaaaggcgcacaaaccaccagcgatgcctccaccagctcctgctcctttaagttttaatgttgcaggggagactttttcataaaaatcttgtattgcctgatctacggcctcaaacatagtagaatccaaccctttttgcttgccaaacgtataggtcgcaccttggtgtccacataagggactcacaacatctgctaaaatacgaatgtgaacatcttcaggaatttcatagcgattttctgttgaaacagaagctaggtttagtaaggattgaccgcaaacgggtaaggcatttccatcctcatcataaaattgataacctaaaccagcagcaatcccaatacctccatcattactggccgtaccgccaacgccaatatagatttctttaatttcttgactaatgaggtggcgaatcaattctccaataccacgagtttggatttgtaatggatttcgtttctctagcgggatttttccaagaccaaccaaatcagcaacttcgaatagggctagttgttctttttgaaaatagcgcatgacttctttttgtccaaaaggtcctgtcacttggagacatttttcttctaggtcaagagaatgtcggatagcatctacagtgccttctcccccatcaccgacaggacagaggagacattccacatctgctatcgattgttggaagcctctttttattgcttcagctacctgttgagctgtcaagctttccttaaacgaatccggtgcaattacaatcttcatatttataattcatcctttcgtttcactcaaggcacaacacagaatgaaaaagtgttgtgctctttattttgatttattatataaatgagaaagcctatcactactacaaatcactatgcgctgaaaaacggattgtgcccttcccgtttcaatgcttccgcatagctcgggatgctttcctgttcgcccaagggattgtgcaacaggtaaacgtgttccacgcggcactccgccatcaggtcgaggaaattttgctggatgacggcgatgttgtcggtaaaggaaagctgccacgaaaacacctgcggcacgacttcaaacgcgccgtcggtcgcattaaacccgaataaaatctgtccgcccgcctttgccgcagcgaccacgccgacgcgcggactctgcatacggacggcgcgtatcgcgtttgccgcaaacacatccatcgccatacgttggcgcgtgtggctgccgtctgaaagcgcgcgtaccggagaatccggggaaagcggattggcaaacagcgtaacgccttccgatgcaagattttcctgccatacctgcatcaggggcagacctgcctgaagaaggttctgacccaatgccgtctgaactttgccgctgccgaaacccagcgcgtaaacgacgtggacggactgcccttcgggcaacagcaaagggcgcggggcgaaacggcgcaagtgttgcgccgccgcttcggtattttgtttggcacgccaccactcatccggcgcgaccgcgctcaaatcggaagaatgcacaagataaggcagccattgcgtctcttgcgtcaacgcgcgcaggtgcggatagttttgcaggcaggcaaacaatgcctccgtcggcagcttcatctcgattgcacgttcttttttgcagccggacaccagcacgaccggcagggcgaaccactgcacttcgccttctttctcgcaatcgagtaccgcgttcacactggaaagcagcgcggcataagttccggcatcgggcgacatcgtcagcgcgagggaaaggttgatatagtggttttgctcaagcattcccctgatttcggtttgaagttggccggacgagagtttgcgcgaagcctgggaagaattatgcgccaactggtaggcattgagcagcaggtggtttttaatcggattttggggatacgggcgcgtatcgggcaaggtaaatgtctggttcatatgtgtcgtgcaccgcttttcgcagtgtgtgtctttcctgtctgaaaatatatcggacggattgccgccgggacttgcccgtcaatccgccgaaacgagaaaatgcctgtctgccaagtctgccaatatttcttccacatacacttcggcaggcggatggaatgtcaaaccgtcgggcgtggtgctgacgatgttcaagttttcggcaaccgtttcaatcaatgcctgtttgctcgtcggccgcgacaattggcgcataatgtacaaatgcccgtatccgaatgagggggtgctttcgttgtaacggttggcaggccggacaaacgcttccgcgccgtgttccacaaaggcggcggcatagtttgtaaagcgcgccggcacataggttttatggtcttcaaaaaatggtttgcccgcattgtctgatgaaacagaaaaacgcccgagaatggtttgcaataaaagctgggaattgattttcatgcggtcaaattccaaaccgggaaatcggcgggcgagattttccgcaacatcttccgttttaaacgcctctccggttttcatcacatcgcgtatgcccgaaagcaggatatcgttttcatcaaagttgattgtttcccctcttgccgggcggaaattcaaactttctatcacttcgacggcaaccgactcatcacgcctgacagtatccccgacttcctcacggcataaaagcgaacggcggaattggcggtcggataaaatatcactgtaaaattctttggcaatataatcgtcccctgccaatgccagaatccgctcccgcgtatgctccgccatccaagaaacaaaagacacgtgcaaattggtatccccgatatatgcgagcctgtggcggttagcccattcgatgaagccgttgacgtaaatcgggtcgttaaacgcctccatatattcgtgtgcgatgtaataaaaattatgattcaatattttttgaatcgccggaagtttgccgccgccgtccaagcccttgtcgttttccaaaatttccgccagcgccttgagcgcgtccaagcctttccgcgtccgcgcttccaagggttcttcaagcacatccctgccggcaaagtacataatttcgcgcaactgctcctgccgtttccagccggggtaaacattgtatgaaatataggcaatgccgtgtttggtcaggttgttccagcaaatcgaaaaaattttgtctttaactgcgtcaggcacccacgaccaaatgccgtggacgatgatatagtcaaacttcccgaatgactcatcgatggtcaaaatatctttttcttccagacgcacatttttcaagcccattttttcaatgatggcgttgccctgtgcaacctgcctgccggacaggtcgataccgacaaattccgcatccgggtaataaagtgcctgcgtgatgatgtttccgcccatcgaacagcccagctccaagaccttggcattggcggcgggcgcgggctgcaaacccatcaggcgggcgcgcgcctccaaattattgatggcggtttgagagaatgcgccggattcgtacatcaaatcatcatatgaatttttgatgttggacacgtccggcacaccgttctccgttgcagcacgcgcaaaggcggcttttttcttcttgttcggcatattttgtttgtctgaaggcactattgcccgcaagtttaaccaattcatcctacccgttcaactaaatcaaatgccatctgaaggcgcggagcgtacttcagacggcatctgggaggcgcgaaggcttcagacggcatttttgccgctttatttcaacgcggcatcatagccgccgtcttcaacggcttcaatcaacgcccctgcatcggtttgcgcggggtcgtatccgacggtcgcacttttgttttcaaggctgacttcgacgcttgccacgccttttacgccttccaatatccgggtaacgcttttgacgcagccgccgcagctcatgccgccgatgtcgaggataagggtttccatgatttttcctttcgttggtactgcattctgacgggcgttattgtaagtcggggcgtgaacttgggcaaacgcggaaacggtgcggcggtttgaaaaaatacggacgcttgcgcataatggcggcaattcccatcaggacaacaacaatgaacgcttcgcaaaaaccctggttgagcatcattgccttggcaatcggcgcatttatagtggattaacaaaaaccagtacgtcgttgcctcgccttagctcaaagagaacgattctctaaggtgctgaagcaccaagtgaatcggttccgtactatttgtactgtctgcggcttcgttgccttgtcctgatttttgttaatccactatacaacgtcggtatcggcggcggcgcgctgctggggcattgggttacgcaatactcgggcatttcctgcatcggcgttgcgggtatgctgacggcggcggcaggtttgtgggtctgcctgaacctgaaccgccatatccgaacctgaccgcacgatgccgtctgaagcccctcccgcccttcagacggcattttgattgaagaaatatccacccctgcttaaaataacgggctttgccgtgttttaacgcctattttttgttccaaggatggtttatgccgctgctgtctgtcgagttcgcactgttctttctcgccttcctgccgatttactggggcttggcgaaatacccgtccgtccaaaacctgctgcttttggctgccggtatgggctggctctaccatatcggccctgtatttgcggcaatcatcgtcctttattcctcctgcgtgtaccttttgggcgaactgctccgttccgatcgcgaaaatacgcgccgtttctggctggggtgcggcattgccgcctcgctgaccgtcttgggctttttcaaatatttcgactttttccgcccgatgattgcccaatatgccggaaaaggcggcgcaatcgacatcctgatgccgctggggctttcgtattacaccttccagtcgctcgcctatctggtttactgcttccgcgccccgcacgccgcgcgtttcagctggcacgagctgctgctgcacctgagttttttccccaccgttacctccggcccgattatccgcgccgccgcattcaaaagcgcagacggcgagcaggcaggcgcattggcgcaaatccgtacccgccgagcgcgttcgcccgtccgccccgcactcgccgtttccctgattctgctgggtattgccaaaaaatggtggctggcggggatgctggcggaaaactgggtgtcgcccgtatttgaaaatcccgcccaattcgacggctggggcgtattgggcggcgtgtacggctataccttccaactctttttagacttttccggatattccgatttggttatcggcatggcgatgctgctgggctttaggctgcccaaaaatttctccgcaccgcttcgtgctttaaacatccgcgcattttgggacaaatggcacatcagcctttccacctggatacgcgactacatctacatccccttgggcggcagcaaaaaaggctttttacggacacagctcaacctgatggcggcaatggtgctctcaggcatctggcacggctacggctggaacttcctcatttggggcgcgctgcacggcacggcactggtgctgctcaacacgggcgaccgctatttcggacgcgacgcgctatgccgtctgaaatacttcgcgccgctctcatggctcattaccttccatttcgtctgccttagctttgtcgtcttcaataccgcaaatcccgacgatgcaggcgcagttttcagtgccctctttgccaatgccaacggctggaatgcgccgcaacaggcaaacatgctgttgcttgcctcgtttgcatccgtgatgctgctctacccttacctgcaacgcgctttcgacggcgcggtcaaaggtttggaaaaaatcccgatgtggctgtggtttatccccgtttccgccgtcctgctgctgattatcgtcctcgccccctcggggatacccggctttatttatgccaatttttaagggtttggacatgaaaaactttctttcccttttctcctccatactgatgtctgccctgattgccgtgtggttcagccaaaaccccatcaacgcctactggcagcagacctaccaccgcaacagcccgctcgaaccgcttgccgcctacggatggtggcggagcggtgcggcgttgcaagaaaacgcctacgccctttcagacggcatcaaagccttcctgtccggcgaaacgccgccgacggctcaagacggcggttcggcagatatgccgtctgaagccgccgcatccgaagccgtccctcaaaccggtgaaacagaatggaaacaagacaccgaagccgccgccgtccgcagcggcgacaaagtcttttttgtcggcgactcgctgatgcagggcgttgcccccttcgtgcaaaaaagcctgaaacagcaatacggcatcgaatccgtcaacctcagcaaacaaagcacggggctgtcctacccctcattcttcgactggccgaaaacgattgaagaaaccctgcaaaaacatcccgaaatcagcgtactcgccgtcttcctcggaccgaacgacccgtgggatttccccgtcggcaaactctatctcaaattcgcttccgacgaatgggcgcaagaatacctgaaacgtgtcgaccgcatccttgaagccgcacacacgcaccgcgtccaagtcgtctggctcggcatcccctacatgaaaaaagccaagctcgacggacagatgcgctacctagacaaactgctttcggaacatttgaaaggcaaaatcatcctgattcccaccacgcacaccctgagcggcgggaaagaccgctacaccgactccgtcaacgtcaacggcaaacccgtccgctaccgcagcaaggacggcatacactttaccgccgaaggacaaaaactgctggcggcaaaaataatggaaaaaatcgtttttgaaccaagtacgcaaccatcaagtacacagccatgaaccccaaacacctcatcgcattttccgccctattcgccgccacgcaggcagaagccctacctgtcgcctccgtcagcctcgacaccgttaccgtttccccgtccgccccctacaccgatacaaacgggctgctgaccgactacggcaacgcctccgcctcgccttggatgaaaaaactccaatccgtcgcacaaggcagcggcgagaccttccgtatcctgcaaatcggcgactcgcataccgccggcgacttctttaccgacagcctgcgcaaacgcctgcaaaaaacttggggcgacggcggcataggctgggtttaccccgccaacgtcaaagggcagcgcatggcggccgtccggcacaacggtaactggcaaagcctcaccagcaggaacaacaccggagacttcccgctcggcggcatcctcgcccacaccggcagcggcggcagcatgaccctgaccgcatcggacggcatagcaagcaagcagcgcgtttccctgtttgccaaacccctgcttgccgaacaaaccctgaccgtcaacggcaacaccgtctccgccaacggcggcggctggcaggtactggatacgggcgcggcactgcccctgaccatacacaccgaaatgccgtgggacatcggcttcatcaacatcgaaaatcccgccggcggcattaccgtttccgcgatgggcatcaacggcgcacaattaacccagtggtcgaaatggcgtgccgaccgtatgaacgacctcgcccaaaccggcgccgatttggttatcctttcctacggcaccaacgaagctttcaacaacaacatcgacattgccgacaccgaacaaaaatggctggataccgtccgccaaatccgcgacagcctgcctgccgccggcatcctcatcatcggcgcacccgaatccctgaaaaacacgctcggcgtatgcggcacacgccccgtccgcctgaccgaagtccaacagatgcagcggcgcgtcgcccgtcaggggcagacgatgttctggtcttggcaaaacgccatgggcggcatatgcagcatgaaaaactggctcaaccaaggatgggccgccaaagacggcgtacacttctccgccaaaggctaccggcgcgcggcggaaatgctcgccgacagcctcgaagaactcgtccgctccgctgcaatcaggcaataatcggacaggaggcggacggtatttccgcaacagggggatgccgtctgaaacgcataccttcatattgcttcagacggcatagccaccccgcgcacggtttgccggacgcaaccggcattcgcctcaggcatcggaaggacgcaggcgaacctccggcatacggcgcaaaggcggcgtttgatatgccgtctgaaggcaaagatgataaactgccgccttccgttttcagacggcatattgttttcaaatgagggcgttctccgtccgcaaccataaaggaagtttcatgaaccggacttatgccaatttctacgaaatgctcgccgccgcctgccgcaaaaacggaaacggcacggcagtgttcgacggcaaggaaaaaaccgcctaccgcgcgctcaagcaggaggccgaagccgtcgcggcgtatctgcaaaatatcggcgtgaagttcggcgacacggtcgcgctggcggtttccaattccacagaatttattaccgcctatttcgccatctccgccatcggcgcggtcgccgtaccgatgaacacatttttgaaaaacagcgaatacgcgtatatcctgaacgactgcaaggcgcgcttcctgttcgcctcggccggcctgtcaaaagaattggcgggcttgaaggcgcaaacgcccgtcgaaaaaatcatttggacggacaaaagccgtccgaccggcgaaacggcggaaggcgatgccttttttgaagacgtgcgccgcttccccgaaaaacccgacttgggccgccaaccccggataaatgatttggcacacatcatctacacctccggcacgacggggcatcccaaaggcgcgctaatcagttacgccaacctgttcgccaacctgaacggcatcgaacgcatctttaaaatttccaagcgcgaccgctttatcgttttcctgccgatgttccacagcttcacgctgacggctatggtgctgctgccgatttatatggcgtgttcgattattttggtcaaatccgtttttccgttttccaacgttttgaaacagacactgctcaaacgcgcgaccgtgtttttgggcgtacccgcgatttacaccgcgatgagcaaggcgaaaatcccttggtatttcagatggttcaaccgcattcgcctgtttatcagcggcggcgcgcctttggcggaacaaaccatcctcgatttcaaagccaagttcccccgcgccaaattgctggaaggctacggactgagcgaagcctctcccgtcgtcgccgtcaatacgcccgagaggcaaaaagcccgcagcgtcggcatccccctgcccggtttggaagccaaagccgtcgatgaagaattggtcgaagtgccgcgcggcgaagtgggcgaactgatcgtcaggggcggttcggtgatgcggggctacctcaatatgcctgccgccaccgatgaaaccatcgtcaacggctggttgaaaacgggcgatttcgttaccatagacgaagacggctttatctttatcgtcgaccgcaaaaaagatttgattatttccaaaggtcaaaatgtctatccgcgcgagattgaagaagaaatctacaaactcgatgccgtcgaagccgccgccgtcatcggcgtgaaagaccgttatgccgacgaggaaatcgtcgccttcgtccaattgaaggaaggtatggatttgggcgagaacgaaatccgccgccacctgcgtaccgtgctggcaaatttcaaaatccccaaacaaatccactttaaagacgggctgccgcgcaacgctacgggcaaggtattgaaacgggtgttgaaggagcagtttgacggaaacaaatgaacgccgtgccgtccgaagccccgtccggcaaaaaaatgcggtgaatctgattcaccgcatttttttgacaaacaccggagggagggcatttactctgccaattccacctgctcgtgcgccatcagttcctgaccgacatcatccaacaacatcaaataacgttcgtagtttttcaaaatgtcggcaatcagctcgtccttgttcatatactgcacatcgtacccgacgcgcccgtcgaaaaaataagcgtagggtttgtaagttgtctgatgccggatatgcggcagcttgccgtcgttaatcaactggtcggatacatcctgcccgacagacttaatcccgtacataaaatcgcgcatcgtctctttccgaatgacgaactcgattgcgggctcgtcccgatgaaacattttatcgacccggacgctcaagccgtattcttccgaaagctcccgttgcaactcgtgcatagcgggcgatgcagtctgtttgaggaattttaaaatatcctgctcctgcgtctggctcattatctgcaccagccgttctttccacttgccgcccgtccaaaatacactggtagggttaacccgggtctcaaaatatttcttatccgcactcaagcctttccacaggctgaaacacattatcagcatcagcagggcaaacggcagggaaacaatcagggtcatagactgcaggttgccgagtccgcccgagcgcatcagcaaaacggcaacggcagacatcagcacgccccacataaccgcctgccaccgtggcgcgctcaagcctttgtcccgagaggtaatattgttcaggacataaatcccggaatcggcagaagttacaaaaaacagagaaatgaccagcaggctgacgatgctcgtcaattcgggcagggggaggtaattaaagaatttaaaaagcagcgtttccggagaggaggtcatcttttcgagcattccccccgcaaccccgtcattcagccaaatcgccgtattgccgaagacggtaaaccacaaaacgccgaacaggccggggatgagcaaaaccccgaagacaaactcgcggatggtgcgcccctttgaaatgcgcgcgataaacaaacccacaaacggcgcccaagaacaccaccacgcccaataaagcaccgtccaagattcaaaccacggcttgtgttcccgttcgtacgcataagttttaaaactgaggcgcaccagatttccgaggtagttccctatgttgtcgccgaatgccgacaacaggtaaacagtgggtcccgccgccaaaacaaaaaacagcagcaaaaacgcaaggcccaggttcaactcgctcaacaccttcacgcccttccccacgccggatattgccgaaacgacggcgagggacatgacggcggcgataatcaaaacctgcacgctgaagctgttttcggcaatccagcccatttcctgcaatccggcgcccagttgcgaagccccgaaccccaatgtggtgatgatgccgaaaaaagtagcaagcaacgccataatatcaatggcatcgccgaaccttccggaaattttttctttcaacagggggtaaaaacaagaacgcagggcaagcggcagcttgtagcggaaaccgaaataagccaaagccaatgcaatcgtaccgtacaccgaccaagcgtgaacgccccaatggaacaccgtgtgcagcaatgcctgctgctgcctgtgttccggcgtgccggccgtaatgtccgaaaaataatgcatcaacggctctgccacgccgaaaaacatcagacccacgcccatcccggccgcaaacagcatcgccagccacgacaggaagccgaattccggcacatcttcatcccgtccgagcctgatgtttcccaaactgctgaccgagagtatcagcaggaaacccagaaaaatggaaaacgttaaaacataaaaccagctgaactcggtaaaaatgacttcttttgcccgatcgagccacatctgcacctgatccggcacggttaaaaccaataccaccaaaacacacacaaaaaacaaagtcgtcaaaataaccatcggattaaatgacgttcggcgttctataaattcagacagggacaaaccttctcactcctttgttaaaaacagacaaacccggtcatcgggcaaagcggtcaaaacctgccggtaaaataccggcttccggatgacgaaatgcacaaaccggccgaaattgttataatcgaaaaaattaaaaatcaatacggattattctatcagattgatttatcgatatttattatatcattaatatagtttgatttcaaaccggcggaaaatgcgccgcccaccgcaggcgcgccctccccgctatcggggcgtttaacgccggattgccgatgcggtacaatggctgatatgaagaaaattacccctcaaaacctgcgccccctgctttcggaaagcttgggacataccgattttgtcaacgtcctcaacgcactgattaaatttttgcgccgtggcggcaaaaaatgtgcgggggaacgtttcgacctgattatcgacacattcaaacaagacagggaattactgtcccgcttcagccggtgtttttacatttggctcgcgcaaatacacatttatccggcactcatcaaactcggcatcttctcgcgccacagctttgcccgggaaatgggcatacgcatctacgaacgcttcagcccgtcatataaagattttgccaacttgggcgaagtcttcctttatcttttccattccgaaaacgacgacaaatggctgcaaacgctcaatatccgccaatggctggttttatacgaactcatccggagccacgccgagccgtccaaattgcagacggcgggcatccgccttgccgatgcgcgtttgcgcgccatcgaaatgctgtctgtctggacggcatccgaagccatcgaacccgacctcatccgcatcgccccgcgcctgctggaagccgattcttccttcgtcgccctccaacgcgaaaccgccaaactggtcgaacactaccgcaacggcaccacgccttacgacaccgcccacctcgaagtgatgttcgaccaatgtttcagccagattgactatttgcgccgcaaagggacgggcgccggctccggttcgtcggtcaaagtcgcccacctgctcgaacggctccggcagaccgtagaccgtctgaagctgctcaccgacatccaaaccggcgccggcaacagcaaccgcctgaccatcgcgctgatgaactccctcatctacgcggcggtcgaacaatacagcacccgccacctgcgccgcagcagcatccgtatgctcgcccgcagcattaccgaaaacaaaagccaccacggcgaacactacatcacccgcaaccgcaaagaatatttcaaaatgttctactcggcggcaggcggcggcatcatcatcgccctaatggcgctgctcaaaatccgcatcggctcactcggcctcagccccttcctcacttccttgtcggctgggttcaactacggcatcggctttatgatcatccatatgctgcactgcaccgtcgccaccaagcagcccgcgatgactgccgccagctttgccgaacaggtcgatctcaacgaaggcggcaaagcggtggacaacaaactcgccaagctcctcatcgacgtatgccgctcccaaagtgtcgccgtcttcggcaacgtttccatcgccatccttttggcgtgcgccatatcgttcggctatgcccatctgtaccggctgcccatactcgatgcccacaccgccgcctaccagttcaaatccatagacatcatcgcttacccgacgctgtggtatgccgccattgcaggtctgtggctgttctgctccggcatcatcgcaggttttttcgacaaccgcgccgactacctcaacctgcgccaacgcctgcccttcaaccccttgctgcgtaaaatcatgcgccccgggccccgccgcgtcctcgccgcctacatccacaaacactacggctcgctggtcggcaacttcatcttcgggatgctcttgggtatgaccggctatttcggacacctcctcgggctgccgctggacatccgccacgtcgccttttcctccgccaacctcggctatgccgccgtcagcggcaacgtcggtttgggcacgttcgtactcggcattttcagcgtcctcgccatcggcctggtcaacctctgcgtcagcttcagcctcgccctcttcgtcgccctgcgctcgcgcggcacgaaaatcggcagcatccgcaatctgattaaaagtttttggaatcagattaaaagcaatccctgcatacttttcctcccgcccgccaaagaacagggacatcctccttcggacaagccttgaccggcaatgccgtctgaagcgggattcgccccgaataccgccctgatgcgggaaatccccataaaaggatgcaaaaatgccgtccgaaccgaaacgtggttcagacggcattttaaaaaacattacaatcccgggccgccaagcgaattggcaatgtccctgaccgccgttacatacatccggctgtggttgtactgccataccgtataaaaattgttcaagcccaaataatattcaaacacgcccggtgcggtttccagtttgaacaaaaccgccttttcatcatctgcaagctcttcgccggggatgatgccgtacgccttcaaatccgccaccgtccgcgtcagggcggttttttcgccaatgattgcctgaacatccgcacccggcgccaatgttgcagacaccagcattttcccgcccgtgcgccaaccgtgctgcttcatataattggcaaccgatgccgcgacatcgccgacgttgccccatatgtcccgatgtccgtccccgtcataatccaccgcccatttccggtagctcgaaggcataaattgcggcatccccattgcgcccgcatagctgcctttaaaggcgaaaacatcgccgccttcttcttttgccagctttaaaagctcgaccaattctttttggaaaaacccggcgcggcgggggtaatcaaagcctaaggtcgccaatgcgtccgccacacggaaactgcccgtatttttgccgtaattcgtttcaatcccgataaccgccacgataagttcggcaggcacgccgtatttttgcgccacatcatcgataagcgcgcggttttccgcataaaaccggcgcgcgccgcgaaatttcgccttgcccgaatttcccgtgcggaacacataccacggacgcgatgtggaggggcggtgcataatcttgacgatgtccgccttgtaagccgctttgtcaaaaaaatcctgccattccgcccgggaaaaatcccctttcccgacttcatcgtccacaaaacggcggacatttgcattggcggcaaacccgctgtcggataccggtacggctgccgcgtcaaatacggctgccgcgtcaaacgcggggcggctttcttttttcatttcaaccgcgcggggggcttgggcttcatttgcccggggtgggcgtgcctccatcgccgtacaggcagacaaagccgccaaacaaattgccagcggcagtatttttctctttttcataaatatgttccgaacaaatagggtaagtgggaaagcggcacaagggggcggcgcgaaatgcggcatccgccgcaatcggcggctttgcggaatgccgcacgttgcctcttgcaccgcccgaaatccgtatgtcgtcgccgaaaatgccgtctgaaggcacttcccctttcagacggcattgcctgccgccgtatttgcccgctacccgcaatatcggcagtccaatatatctttgcggatgtcgttcagcaggaaggctgcggtgtcttcgtgtttcgcctgtacgaagacaaagagtcgggcgatgattttgccgataaagactttttgcagggcgcaggcatcggtcagggtgtgttcctgcaggaagctgcggatgtcttcaggcaaagtgtagtcgcgggcgacggcggcaaagcgggcatcggtttgcaggcggtcgagcagggtttggtttttgtccaacttcatgcctgcttctttttcttcggcggtggcgcggacaaactggtcgtaaatttcggcataaagcatatcgttcgggccttcaaaaatcgtgaaggggcggatgtcgatagcgatattgccggcggtgtgtccgcgttcaaaacccttcgcacccaagagtttttgcaacatttgcgcggcggcgtaagtgtattccgtggcgagggttttgacgatgttcgcctccatcagctgatgggcgacgggggcaacaggcgaaacggaatggcagacgtagcggtaaagaatctcggaaacctgatggcggcgccggatttcgcggcgttcgtaatcgacgaatttgatgtcgttgcggacgtatcgttccagattttcaaggatgtattccataatgccgtgcgtcatgccgatcagttgcaggcggctgcggataaagatgttttggaacgcgcgcaaaccggcagcgtcgctctgggagagtttcatcacggcggttgcaggcatttcggcatcgatgcggttgacggcgtaacggacggcgcgcaagccttcggatgcgagggtttcgcagcggatgtatgttttggggacgagcagcaggtcgatgactttggcgagtttgccgtttttgcgctctttggcggcaacgaggaggaagtcgctttgcgagttgccctgccagtatttcgcggcgttgacgtaaatggtttgtccgtcgatatattcgtagtaggactgcatttcgcgtgcaatcgccgcgccggaggtttcgggttcggtaacacccaaaccgccgccctcgcctttgaaaatcatctccaaaccttgcgcgacttgcgcttcatcgccgaactcttgcagtggctgcaacaccagcgcgccttcgatgccggtacgcagcgtaacgggcacgccgtaatgccccgcaatccgcaggacttcttggatttcaaactggctgcccttgcgcccgccgtattttttgtcgaggaagggcaacagcaaacccgcctgcttcaaggcaagccatttgtcttcgggcaggtatcgcatcaggtcgataccgtctgaaaaaatgcggcggaatgcggattcgatgtgctttaaaaaagcagccgtgtccatagttgacggctgcgcgctcggttcggtgtgtatcatcggcttcctctgtcggttcccattaatcggcggccggtcaaaccgcctgccacagtttagagttgattttctaaactttaccacaaagtgcgccgggcaacaatccgccgacctttcagacggcatcgcgtcccctcccgtgctaaaatgaccgtttgcatcactgtccgccgattgccgcactatgacctaccccatccccaaaccccgtgaaaaatcccgttggcccaatctttcgcaaggctcgctgcccttggctttggcgcgttatctgccgcacaagcggctcaaggtcgtgctgacccaagatgcggaacaggcgttgcgccttcagacggcatggcggtttttccgtccgcacgacacggcggtgttcctgccggactgggaaacgctgccttacgagcgtttttcgccgcatcaggatttggtgtcggagcggctgtcggcgttgtggcagattaaaagcggcgcggcggatgtgttgttcgtgccggttgccacggcgatgcagaagctgccgcccgtgccgtttctggcagggcgcacgttttggctgaaaacggggcagactttggatataggccgtctgaaaagtgatttggtggatgcgggctacaaccatgtttcccacgttgtcgcggcgggcgaatttgccgtgcgcggcggtatagtcgatttgttcccgatgggcagcgaaatgccgtaccgcatcgatttgtttgacgatgaaatcgacagcatcaaaaccttcgataccgaaacgcaacgcaccatttcccccgtttccgaaatccgcctgctgccggcgcacgagttccccaccgacagcgaggcgcaaaaaatcttccgcagccgcttccgcgaggaagtcgatggtaatccgaacgatgcggctgtgtacaaagccgtcagcaacggtcatttcggcgcgggcgtggaatactacctgccgctgttttttgaaaacgagttggaaacgctgtttgactatatcggcgaagatgcgctgtttgtctctttagacgatgttcatgccgaggcaaaccgtttttggagcgatgtcaaatcgcgttacgcgatggcgcagggcgacgaaacctatccgcctttgcttccacagtatttgtatctctctgccgatgtgttcgcaggccgtctgaaaaactacggacaggtgctgcccgatgtttccggcaaggaatacaccctgcccgaccttgccgtcaaccgccaagcagatgagccgttgcaggcattgaaggattttcagacggcgtttgacggacggattttgctgtgcgccgaaagtttgggacggcgcgaaactatgctcggtttcttgcagcaaaacggtttgaaagccaaacccgtgtccgactggcagggctttttatcggcacacgagccgctgatgattacagtggcgccgttggcatacgggttcaaactgggcggactgcaatcgccgaaccaacagcaacctactccctcccccgtgggggagggttggggagagggcaaagcagttgccgctcaaactgaattttccgcagccgcaataaaccctctccctagccctctcccacaggagagggaacaaagtgcagccgccgtttcagacagtctgaaagcagccgccgtttcaaccgaaagcagcctgcccctcggtacaagtaatctgcacgggcaaatccgacagcaacctgccccttcccccgtgggggagggttggggagagggcaaagcagttgccgctcaaaccgaatttcccgcatccgcaacaaaccctctccctagccctctcccacaggagagggaacaaagtgcagccgccgtttcagacgacctgaaaaccaaaagcagcctgcatcccgtcgcaaataatctgcacgggcaaatccgacagcaacctactccctcccccgtgggggagggttggggagagggcaaagcagttgccgctcaaaccgaattttccgcagccgcaacaaaccctctccctagccctctcccacaggagagggaacaaagtgcagccgtcgtttcagacagtctgaaagcagccgccgtttcaaccgaaagcagcctgccccccggtaaaagtaatctgcacgggcaaatccaacagcaacctgccccctcccccgtgggggagggttggggagagggcaaagcagttgccgctcaaagtgccatcgccgtcatcaccgaatccgatctctaccaatacgtcgcccgttcgcgcatccacaaccgccgcaagaaacacgccgccgtttcagacgggctgttgcgcgaccttgccgaaatcaatatcggcgaccccgtcgtgcacgaagaacacggcatcgggcggtatatgggcttggtaacgatggacttgggcggcgaaaccaacgaaatgatgttgctcgaatacgcaggcgaagcgcagctttatgtgcctgtttcgcaactgcatttaatcagccgctactccggtcaggcgcatgaaaacattgccctgcacaagctcggcagtggcgcgtggaacaaggcgaagcgcaaagccgccgaaaaagcgcgcgacaccgccgccgaattgctcaacctctacgcccaacgcgccgcccaatcgggacacaagtttgaaatcaacgagttggactatcaggcgtttgccgacggcttcggctacgaggaaaccgaagaccaggccgccgccatcgccgccgtgattaaagatttgacgcaagcgaagccgatggatcgccttgtgtgcggcgatgtcggcttcggcaaaaccgaagtcgccctgcgcgccgcgtttgtggcggtgatgggcggcaaacaggtcgccgtacttgctccgaccacgcttttggtcgagcagcacgcgcaaaacttcgccgaccgtttcgccgatttccccgtgaaagtcgccagcctttcgcgtttcaacaacagcaaagccaccaaagccgcgctggaaggcatggcagacggcacggtcgatattgttatcggtacgcacaaactggtgcaggacgacatcaaattcaaaaacttaggtttagtgattatcgacgaagaacaccgcttcggcgtgcgtcagaaagagcagctcaaacgcctgcgcgccaatgttgatatccttaccatgaccgccacgccgattccgcgtactttaagtatggcgttggaaggactgcgcgacttctcgctgattaccaccgcgcccagccgccgcctcgccgtcaaaacctttgtcaaaccctttagcgaaggcagcgtgcgcgaagccgtgttgcgcgaactcaaacgcggaggacaggtatttttcctgcacaatgaagtagatacgattgaaaatatgcgcgagcggctggaaaccctgctgcccgaagcccgcatcggcgtggcgcacggacaactgcgcgagcgcgagctggaacaagtcatgcgcgactttttgcagcaacgatttaacgtgttgctctgttccaccatcatcgaaaccggtatcgatatccccaacgccaacaccatcatcatcaaccgcgccgacaaattcggactggcgcaactgcaccagcttcgcgggcgcgtcggccgcagccatcaccaagcctacgcctacctgctcacgcccgaatacatcactaaagacgcagaaaaacgcctcgatgccattgcggcggcagacgaactcggcgcaggttttaccctagccatgcaggatttggaaatccgtggtgcaggcgaaatccttggcgaaggacaatccggcgaaatgatacaggtcggcttcacgctctacaccgaaatgctcaaacaagccgttcgcgacctcaaaaaaggccgccagcccgacctcgacgcaccgttgggcatcaccaccgaaatcaaactgcacagccccgccctgctgcccgaagattactgccccgacatccacgaacggctcgtcctctacaaacgcctcgccgtctgcgaaaccgtgcaacaaatcaacaccatacacgaagaactcgtcgaccgcttcggcctgcccgaacaacccgtcaaaacccttatcgaaagccaccacttacggcttatggcaaaagaattgggtatcgatgccattgatgcggccggcgaagcggtaacggtaacctttggtaaaaacaataatgtcgatccaaccgaaatcatcctgctgattcagaacgacaaaaaataccgccttgccggcgccgataagctgcggtttaccgcagagatggaaaatatcgaggtcagaatcaacaccgtaaaaaacgttttaaaaaccttgcaaaacagatgcctgcccaaataaagccgacaccgcaatgccgtctgaaacaccgttttccttgtccgaaagccgccattatgaatttgaaggaaactccactataatacggcattcagatttccagacggcatcgcgcccgtcaaaccgcacacaaaccaaaaggaaatacatgttccgtaccatgcttggcggaaaaatccaccgcgccaccgttaccgaagccgatttgaactatgtcggcagtattaccgtcgatcaagacctgttagacgcggcaggcatctaccccaacgaaaaagtcgccattgtcaacaacaacaacggcgaacgttttgaaacctataccattgcagggaaacgcggcagcggcgtgatttgtctgaacggtgctgcagccaggctggtacagaaaggcgatatcgtcatcatcatgtcttacgtccaactctccgaacccgaaatcgccgcacacgaacccaaagtcgtcttggtagacggaaacaacaaaatccgcgacatcatctcctacgagccgccgcacaccgtgctgtaattccgcaaacggacatcgattatggatattaaaatcaacgacatcaccctcggcaacaactcgcccttcgtcctattcggcggcatcaacgttttggaaagcttggattccaccctccaaacctgcgcgcattacgtcgaagttacccgaaaactcggtattccctatatctttaaagcctctttcgacaaggcaaaccgttcctccatccattcttatcgcggcgtaggcttggaagaaggcttaaagatttttgaaaaagtcaaagcagagttcggcatccccgtcattaccgacgtacacgaaccccatcagtgccaacccgtcgccgaagtgtgcgatgtcatccagcttcccgcctttcttgcgcggcagaccgatttagtggttgccatggcaaaaactggcaacgtcgtcaacatcaaaaaacctcagttcctcagcccctctcaaatgaaaaacattgtggaaaaattccacgaagccggcaacgggaaactgattttatgcgaacgcggcagcagcttcggctacgacaacctcgttgtcgatatgctcggtttcggcgtgatgaaacagacttgcggcaacctgccggttattttcgacgttacccattccctgcaaacccgcgatgccggttctgccgcatccggcggtcgtcgcgcacaggctttggatttggcacttgcaggcatggcaacccgccttgccggtctgttcctcgaatcgcaccccgatccgaaactggcaaaatgcgacggccccagcgcgctgccgctgcaccttttagaagattttttaatccgcatcaaagcattggacgatttaatcaaatcacaaccgattttaacaatcgagtaacacggtttcgccttatgatgcagactttccgaaaaatcagccggtatgtcgcaaccttgtggctcggtatgcagattatggcgggttatatcgccgcaccggtgctgttcaaaatgctgcccaaaatgcaggcgggcgaaattgccggcgtattgttcgacatcctctcttggagcgggcttgccgtttggggcgcggtactggctgccgcctttgccgccctaacccggcggcaaaccgccctgctgctttttttattgtccgcccttgccgccaaccgattcttgattacacccgttatcgaggcactgaaatacggacatgaaaattggctgttgtcgtttgtaggcggatccttcggaatgtggcacggcatttccagtattgtttttatggcaaccgccctactttcagcagttttaagttggcggctttccggcaaagatgccgtctgaagccctcccatttttttacctcccttcacttcacttggagaacattcatgagcgcaatcgttgatattttcgcccgcgaaattttggactcacgcggcaaccccacagtcgagtgtgatgtattgctcgaatccggcgtaatgggacgcgcagccgtaccgagcggcgcgtccaccggtcaaaaagaggctttggaacttcgcgacggcgacaaatcccgttattcgggcaagggcgtattgaaggcggtcgaacacgtcaacaaccaaatcgcccaagccctcattggtatcgatgccaacgagcaatcttatatcgaccaaatcatgatcgaattggacggtactgaaaacaaaggcaatttgggtgcgaatgcgactttggcggtttctatggcggttgcacgcgccgctgccgaagactcaggcctgccgctttaccgctacttgggcggcgcaggcccgatgtccctgcccgtaccgatgatgaacgtcatcaacggcggcgaacacgccaacaacagcctgaacatccaagagtttatgattatgcccgtcggcgcaaaatctttccgcgaagcgttgcgctgcggtgcggaaattttccacgccttgaaaaaactgtgcgacagcaaaggcttcccgaccacagtcggcgacgaaggcggtttcgcccccaacctgaacagccacaaagaagccctgcaactgatggtcgaggcgaccgaagccgccggctacaaagcgggcgaagacgtattattcgcattggactgcgcctccagcgagttctacaaagacggcaaataccacttggaagccgaaggccgctcctacaccaacgcggaatttgccgaatatctggaaggcctggtcaacgagttccccatcatctccatcgaagacggcatggatgaaaacgactgggaaggctggaaactgctgaccgaaaaactgggcggtagagttcaattggttggcgacgacttgttcgtaaccaatccaaaaatcttggccgaaggcatcgaaaaaggcgtagcaaacgcattgctggtcaaagtcaatcaaatcggtactttgagcgagaccctgaaagccgtcgacttagccaaacgcaaccgctacgccagcgtaatgagccaccgctccggcgaaaccgaagacagcaccattgccgacttggcagtcgccaccaactgtatgcagatcaaaaccggttctttgagccgttccgaccgcatggcgaaatacaaccaactgctgcgtatcgaggaagaattggcggaagccgccgactaccccagcaaagccgcattctaccaactgggcaaataaaaaaggttaaggtatgaagtgggtaactgtcgttttatccttcgcacttgtctgttgccaatacagcctctggttcggcaaaggcagcatcggacgcaacagcagtctgagagaacagattgccgttcaagaagaaaaaaaccagacactcgccctacgcaatcattcccttgccgccgaagtctatgatttggaaaacggtcaagaagccatttcggaaatcgcccgggtagaactgggttatatccaagacggtgaaaccttttaccgactcatcaggcataaccggtaataccgtcaaaaagccgtccgaaccaatgttcggacggcttttatttcaacaaactgtcagacagcccctcatcctcccccgacaaaccgcaatccagcctgacatccccctcgacgcaacagcagcacggcagtatctcgtcccgccccaaaaaagccaaaggcggctcccgataagtaacgcttccctccaaaatcttcactcggcacgatccgcaatatccgcttcggcactgatattccaccatatgccccgtccgttccaagccttccaacagagtctcgccctccaagagttcaaaaaaacccttattcgtaccaatgcgcgccatttccgaccaatcaaaaatatagtggattaaatttaaaccagtacggcgttgcctcgccttgccgtactatttgtactgtctgcggcttcgtcgccttgtccggatttttgttaatccactataatccactataatccactataaaaggaacaataaccgatcctacccgctgtttttcccatcatacaacatacaaatgccgtctgaaacatccggcttcagacggcattttttcaaaaaacatttacaactcaaaatcgcccaaatcatccgtattcacttcagaatctatctgaccgatcaaataagaggatatttccacttcctgcggcgcgacctgtacgttgtcggacgacagccacgcattaatccacggaatcgggttttgatttgcgccttcaaatccggccggcaaccccaccgcctgcatacgcagattggtaatatattcgacgtattgggataagatttctttgttcaaaccaatcatcgaaccgtctttaaacaaatatgccgcccattctttttcctgttccgccgcttttttgaagagttggaaacattcgtcctgcaactcggcggcaatttctgccatttcagaatcatcaacaccagaacgcatcagattaagcatatgctgcgtgccggtcaggtgcagggcttcgtcgcgggcaatcagtttgatgattttggcgttgccttccatcaactcgcgctcggcaaaagcaaacgagcaggcgaatgaaacgtagaaacggatggcttccaacacgttgacgcacatcaggcagagatagagttttttcttcaacccgcgcaaagacacggtaacgggtttgccgccgacattgtgcaccccttcgcccaacaggttgtaatactgggtgtattcgattaagtcatcgtaatagcaggcaatgtcttcggcgcgggcggtaatgtattcgttttcgacaatatcatcaaacacgaccgacggatcattcacaatattgcggatgatgtgggtatagctgcgcgagtgtatggtttcgctgaagctccacgtttcaatccacgtttccaactcgggaatcgaaaccaaaggcagcaaggcaacattcggactgcgcccttggatggaatcgagcagtgtttggtatttcagattgctgatgaaaatatgtttttcgtgttcgggcagattggcgtagtcgatacggtcgcgcgagacatcgatttcttcaggccgccagaagaaagacaattgtttttcaatcagtttttcaaatacttcgtatttctgctggtcataacgggcaacattaaccggctgaccaaaaaacatcggctcattcagcgcgtcgtttttggttttgggaaaggtgctgtatgacatagttaagtgttcgcaggacataatctattctctatattaattaaaaatgatctgtaagttttaactaacctgctgagactttatatatttaataaaattttctaaagttaaaacatgggttttcccaaaagttccaaatgtttttacggattctttagggacaactaaggttaaattctcatcactcatttcctgaatttgagtatcagatataccttcttgtagagtaaataaatgcttatgaggaattcgatctgcttcatttaaaacttggcgccagcgatccttacaagtagtctttgaacctagcattgtcagcttttcagtttgaaatatgaaattccctgattcatccatcgcatggtactcttcacttccaggaaataaaaaatctggtttctttttcccttctgtcttcgcttgcgtctcaaattttaaggaaaattcgtcaaatattcttgataaatgtaactctaaagattttcctgctcttgcttttctgcgatttgtaaaagaatgtgcaaaattaatgaagctatccaaatcagtaatttttgatttaataatttcaaattcacgtttttcaaaaatggaaaataattcatattcctttgaaacccattgttttaacacattactaacgttagttttatttaatgcaatattttcccttgccaaaactgccatttcttcagttttggggaagttaggaaatagtgaaaataattttgttaggttatcctctacttcttgttttttaggtaaatataaacttcctggtaaaatgttagtttctgcgataaatatttcaatatcttcatctgaagataaaacaaaagcatggaataataaatctttataacaagctctgcacaataccaataaggaaccactatatttatcacttaaaaattcaaaattcttgccaaaacccgtaattctcgcctcatttctcgtgccttggccgtaatatttaaaattgctattagtgacgcttccatcttgccaattaattttgattgaaatagttttatttgttcccttttggcaaactacatcaaagaggtcgtctgaaaaatgtttttgaatataaaatcctgattggtgactaccagtagtaccaacatcattgggacgaatataacgacagtatactgcaattgatttatttgctgtctgtattgctgaagctactaagtcatcggatttatttactacttgtattgtctgagctgccaagtcattcattttttaactcatttataatttgtttagcaatagcttgaaccaacggtacagcaattgaattgccaaactgcttgtatgcagctgtcttggatactgcatcaataacaaaatctttaggaaatcccattaaacgcgagcactccctaggtgtcagcttcctaggattttttcctttctgagggatgagtatttcggaaccatctttgtaatatcgtgcagatagagttcgtgatattccatctaaatcaactaatccaaaaccaaatccattaccctttgccttatgttttttagcgtaattttgaaggtaaagccataagttatcagaaagagtaaaagaattatctacatcatcttccaaaatttgctttaattttggttgtgattctggtggggaaggaaaattgaaatttatttccttattaaaatattgtctatcaaaacctacaataaaaatacgctccctattttgaggaacataatattttgcattcataacttgataaaatatctgatagtcaagctcttctaaagtccctttaattactttaaatgtatttcctttgtcatgcgaaacaaggtttttcacattctctaaaagaaaaattttaggtcgatgttttccaataatttcagcaacatcaaaaaatagagttccctgcgccttatctaagaagcctgtttctcgtcctaggctttttttctttgaaacaccagctatagagaatggctgacacgggaatcctgctgttaatacatcaaacttacttggaatagctgctttggtttcctttaatgtaatatctccataaggaatatcattaaaatttacttggtaggtttgacgggctttatcatcccattcactagaaaatacacatcgcccaccaacattctccattgcaatgcgaaaaccacctattcccgcaaataaatcaataaaagtaaatttctcattatttaaggtaactatattatctaattgattttgtattttatttttcatattttatatttcagatgatttattaatctaaaggccatctgaaaactccccctttcatcaaatcttacaagccccgcccgcgcagccgtcatcctgaatatcggtctgcgtatcgtccgcaccgtcgcgggtgttatggtagtacagggttttgacgccgtatttgtaggcggtcagcaggtctttgagcatttgtttcatagaaactttgccgccttcgaatttgcccgggtcgtaggcggtattggcggaaatcgattgatcgacgaatttttgcatcacgccgacaagtttcaggtagccttcgttgccgggaagctgccacagggtttcataggcatttttcagggtttcaaactccggcacgacttgtttcaaaatgccgtctttcgatgctttgaccgttaccaatccgcgcggcggctcgatgccgttggtggcgttggcgatttgagagctggtttcagacggcatgagcgcggtcagagtagagttgcgcaggccgtatttgacgatttcggcacgcaggctttcccagtcgtaatgcaaaggctcgccgcagacggcatccaaatcttttttgtaagtgtcgatgggcagtttgccttgcgaataaacggtttggttaaagagcgtgcacgcaccgtattctttggcaaggtttgccgatgctttgagcaggtaatactgtatggcttcaaaggtacggtgggtcagaccgagcgcggaaccgtcgctgtagcggacaccgtttttcgccagataataagcatagttaatcacgccgatgccgagcgaacggcggcccatagtagaggtacgcgcggcttctaccggatatccctgataatctaaaagtgcatcgagcgcacgaacggtcaagtcggcaagcccttccaattcgtccaagctgtttaatgcgcccaagttaaaggcagacagtgtacacagggcgatttcgccgttcggatcgttgatattgtccagcggtttggtcggcagggcgatttccatacacaagttggactgatgaacaggcgcgacgcgcggatcgaacgggctgtgcgtattgcagtgatcgacgttttgaatgtagatgcgcccggttccggcacgctcctgcatcagcgtggaaaacaggtcggcagccggaatgatgcgcttgcggatatcagggtcttgctcgtatttcgtatagagccgctcaaattcgtcttggtcggcaaaaaacgcttcgtacaatcccggaacctcgttgggcgaaaacagcgtaatgttgccgcccttaatcaggcgggtgtacagcaggcggttgatttgcacgccgtaatcaagctgacggatacggttgtcttccacaccgcggttgtttttcaacaccagcaggctttcggcttcgatatgccacaaggggtagaacaaggttgccgcgccgccgcgcacgccgccttgcgaacaggatttgaccgccgcctgaaacattttaaagaagggaatgcagccggtatgccgcgcttcgccgccccggatttcgctgtccaaaccgcggatacgtccggcattgatgccgatgcccgcacgctgggaaacgtatttcacaatcgcgctggtagtggcattgatggaatccaaactatcgtcgcattcaatcagcacacagcttgagaactggcgcgtaggcgtacgcacgccgctcataatcggagtcggcagcgatactttaaatgtagaaacggcatcgtaaaaccgtttgacgtaacccaagcgcgcctctttcgggtatttgctgaaaaggcacatcgccaccaaaacatataaaaactgcggcgtttcgtaaatttggcgggtaacgcggttctgtaccagatatttgccttcgagctgtttgacagcggcataggaaaaggacatatcgcgttcgtggtcgatataggcgttcagttcgtcaaattcttcgcggctgtaatcctcaaggatatgcctgtcgtattttccggcatcggtaagttttttaacgtggtcgtaaaggtgcggcggctcgtactcgccgtaggctattttacgaagatggaaaatcgccaaacgcgcggcaaggtattggtagtccggggtatcttccgaaattaaatcggcagcggctttgatgatggtttcgtggatgtcgtcggtgcggatgccgttgtagaactggatgtgcgatttcaactcgacctgcgacacggaaacattttccaatccgtccgccgcccaagtgacgacacggtgaatcttatccaaatcaatggcttctaatcttccgtctcgtttggttactttcaaatcagtcggtgtattcatcgcttcctcttccactcttgatattcaagacacagtcttttcaaataaattaaggcagacaatatagtggatttttggcattttctccagtcttgacaacggttgtatttttcagtttcaggcaatgcgcgataaaacccgcctgtcgtatttttcctataatatttgttttatctgataattctttaccgataaaaaacgggtaaattttttgccttttgaccggctccggctacaaggcggtgaaataaggattttccgacgaaaaaggaaagcttcctgttttctgcccctgcaaattgttaaattttgcaaagtatgattttgccgcgccgccgccgacaaattccattttcttaccgattggaatttattattgagattaatgtgttatttgaatctgcatatcaaacggcaagttttgtcggctgaatgagtctgaaactgccgacaatttgcccgttccatccttccatcctatactggaaagaatgacaaactgaaaggatcgtcatgtctgtcaaaaagatgcttgccatactgttgtctgcaatattgggactggtatcgacaactgccgctgccggtacgtcagaacccgcccaccgcgataccaaacatatccgcaaggcaaacaagcagatgctgcaccccgaatgcaggaaatatttggaacgccgtgccgcgtggtaccgatcgcaaggcaacgtgcaggaattgcgcgaaaacaaaaaggcgcgcaaagcattccgctccctgccttatgcggaacagaaaatccaatgccgggcggcttatgaggctttcgatgatttcgacggcggcagtttccgccgttaatcccatataaaatatgccgtctgaacacaggttcagacggcattttccatagatacaacaaactatccttacgccatttcgtttgaggtcctcccgttgccgcagccttaatatagtggattaacaaaaatcaggacaaggcgacgaagccgcagacagtacagatagtacgaaaccgattcacttggtgcttcagcaccttagagaatcgttctctttgagctaaggcgaggcaacgctgtactggtttttgttaatccactatacatccacaaaagcgaatcatactgccacattccgacaaccggtttcagacagcgatatccgcatcgtcggcgacaacggcacggatgctttcttcgattttatcttttaaagcataacggtcttcgctttccgccgcatccgccacgcaaacgaaatcgactcttatcgtcaattttttcatagacacgatgcgccacaggcaggtcggcaaaccgacatcggcatatgagggacgagccgtcctttttcccgtttcgtcataataacgcagcgcgaccgccaaaacctttgcccccgcatcgatggcggattggaacagcgcggctttgaacggcaaaagccccaatccggaggaagtccgcgcttcggggaaaaaactgacgttttgaccgcgttgcaaggtttcgcagacggcgcggttaatcggttcgatgtcgcgccgcgaattgcggttgatgaacaccgttcccgcgttctgccccatcttgcccaataccggccagcttttgatttcctgcttggcgataaagctgctcggataaaccgcgctcatcgcgaaaatatccagccaggacacgtggttggcggcaaccaagacaccgttcggatgttcgggtgcgggtctgcccacctccaatccgatatccaaagccgccaaaacccccctgcccaactcgattaccgcccgattgcgcgactcggggcaaccgccgtcaataccgcgcaggtttttcccggttttgaacagccagaccgccaaacggcacaagcggcgcagacgtgtaaaaaatgaagctttatttgaagacatgagcaattctttcccgataatcggtgtttgttgttgaaacgttcggacggcataccgataaaatgccgtctgaaaccgttttcagtcctatttctgacagttcgggcaataaaacgtgccgcgctgccccaaagtttctttcacaaccaaaccgccgcaccgggggcacggctgattgtgccgcccgtacactgtatattcctgttggaagtagccgcttttgccgtcgctgtccacaaaatccctcaaggtactgccgcccgtttcaatggcgcgctgcaacaccgctttgacggtttcaaccaaaagcgcgcactctttctttttcaggcggttggcaggacggtggggcgaaatgcccgctctgaacaggctctcgttggcataaatgttgcccacaccgaccacgaccgcattgtccatcagggcaagtttgaccgcgcgcttctgcgccttcagccttgcatacagataatccgcacaaaatgcctccgacaaaggctccggccccagtttttccaacagcggatgatgttcttcgattccctcataccaaagtatcgcgccgaactttctcggatcgcggtaacgcatgaccgtgccgtctgaaaacacaatatcgacgtgatcgtgtctgtccggcctgccgatacgtccgtccgacggcgtaaaaatccgcaagctgcccgacatccccaagtgaatcagcagcacgcccgtttgaaagcggataagcaggtatttcgccctcctgccgcaggacaacacctgccggccggacaaaatctcccccaaatcgggattaatctgccagcgcagcttcaattggcgcaataccacggcttccaccgttttcccttcaatatgcggcgcgatgccgcgcaacgtcgtttccacttccggcaattcaggcataacccctcccgacatttcttctgacagatgccgtctgaaagacggctgtccctaatccgcaacccttgccgcacccgccgcaagggctttgccgcccaaatacccgtcccacgcgggcaggggcgttacgcccgctgcccttttgaccaaaaccaaaccgtacactgcggcacactgcggccaccaacggtcgcccgccttttccataaaccgccaaaagcgtatttgcccgagcgacgaaaccggcggcagatacaccataaatttcccaaattcaatatcgaaaccgacatccgcaagccgtcttttcaactcgggcagcggcagacaaaaccgtttttccggcaggcgttcgccgtcaaaccaacggctgaatccccagagcgaatacggattgaaacccgtcagcatcaagcgtccgcacggtttcaatatccggtgcgcttccgacaggatttgcgaaggaacaccgccttcaagcgtatgcggaaaaagcagcatatccgcagaaacatccgccaaagccatattctccgccgacatcgacatatctcgcggcacacagacaacatcttcagacaggctcagccacggaccgcccacctgaaccgcacacattcccgaaaaacggtatgaatccagataccgcccgaagaaatcctgttccaattttgcaacataccgccccatcgccgtatcttcaaaccatgcatccatattgcgtccgtttcaaacagattgcctgccgatattctattccaaacaggatttctgtcaaaaaacacatcggccgcccatttccgaatccgcataaagttcctgtaaaacttgacgctttttcagtcaaacagtaccatcggacgataaaatatgtttattccgccgaatataaatcatgtccaaactcaaaaccatcgctctgaccgcatcaggtctgtccgtttgtccgggtttcctatacgcccaaaacacctcatcacaccaaatcggtttggcgattatgcgcttaaactcttcaatactcgacctgcccccgacaaaacaatatttccaatccggcagcctgtggggcgagctgcgccaaggcttccggatgggcgaagtcaatcccgaactggtacgccgccacgaaagcaaattcatcgcaagccacagctatttcaacagggtcatcaaccggagtagaccctatatgtaccatatcgccaacgaagtcaaaaaacgcaatatgcccgccgaagccgccctgcttcccttcatcgaaagcgcgttcgtcaccaaagccaaatcacacgtcggcgcatcaggattatggcagtttatgcccgctaccggcaggcattacggcctggaaaaaacaccggtttacgacggcaggcacgacgtttacgccgccaccgatgccgcactcaactatctgcaatacctctatggactgttcggcgactggccgcttgcctttgccgcctacaactggggtgaaggcaacgtcggacgcgccatcaaccgcgcccgcgcccaagggctcgaaccgacctacgaaaacctgcgtatgcccaacgaaacgcgcaactatgtccccaagctgctcgccgtgcgcaacattattgccactccccaatctttcggcatgaatatcagcgacatagacaacaaaccctattttcaggcagtcgaaccggatcgtccgctcgacaacgaagccatcgcccggcttgccggcatcacgcaaagcgagctgctcgccctaaaccccgcattcaacgtccccgcgtttatccccaaaagcaaacgcaaactgctgcttcctgtcgcgtccgtacaaaccttccaaagcaactacctcaacgccgcacccgacagcctgttttcatgggaagtctatacgcctgccgccaaaaccagcctgtccgacatctcgacggcaaccggcatgagcattgccgacatcaaacgcctcaacaacctgaacggcaaccttgtcaacgcaggacgcagcatccttgtcgccaagaacggcaaaacccttcagacggcatcggaatccgtcgtttccatcgacatcgacaatacgcccgacacctaccgttccaatatgccggcaggcacggtgaacgtcggcattgcccgaatccgacccgccgccgcacagacagcggacattaccgtcgcacctttgccgcagaaaaccgtccgtacggaacccgatccccttgtccgtattgccgaacctgcccttgcgacagccgcagcgcaacctcaaaccgaaaaacagaccgccatgccgtctgaaacccaaaccgcaacactcgcgcagatcatcccccaaaacgacatgcaggcggcagacgaactcatgcagcttgttgcccgaaacaacctgcgccgacaggctgaagaaaccatctccgccgtcatcggcacgcctgacacagttgccgaacacaaaatttccgcatctccgcaacataccgctgccgccgacggcaaacgccgggtacgtttggaaacgcgcgtagccaaagctgccgacggcgaagccgaaatctccccgctccatgccagcatccaccgcgttgtagaaggcgacaccctgttcaacattgccaaacgctacaacgtcagtgtagccgacctgattgtcgccaacaacatcaaaggcaacaccatccaaaaaggacaggtactccgcctggcgcaggcagcccctgcccaaacccgtattgaaaaagtatcctacaccgcgcgcaaaggcgacaccttcaaaagtatcgccgcgcgcttcaatatccatatcgacgacatccgccggctcaatcccaacctgaacaccatcaatccgggacagagggtcaaactgattggaagctgattcggatacggcacatgacaggactttctcagtcctgtctttttcatcccacatttcccataccatcatgaaacttatcaaatacctgcaatatcaaggcataggaagccgcaagcagtgccaatggctgattgccggcggttatgttttcatcaacggaacctgcatggacgacaccgatgcagacatcgattcctcatccgtcgaaacgttggatattgacggggaagcagtaaccgtcgttcccgaaccctatttctacatcatgctcaacaagcctgaagattacgaaacttcgcacaaacccaagcactaccgcagcgtattcagcctgttccccgacaatatgcggaacatcgatatgcaggcggtcggcaggctggatgcagatacgaccggcgtattgctgattaccaacgacggcaaactgaaccacagcctgacttcgccgagcagaaaaattcccaagctgtacgaagtaacgctcaaacaccccacaggagaaacgctctgcgaaaccttgaaaaacggcgtgctgctccacgacgaaaacgaaaccgtttgtgccgccgatgccgttttgaaaaacccgaccaccctgctgctgaccattaccgaaggaaaataccaccaagtcaaacgcatgatcgccgccgccggcaaccgcgtgcaacaccttcatcgccggcgattcgcacatctggaaacagaaaacctcaaacccggggaatggaaatttatcgaatgtccaaaattctgaaataacatccaagaattccatttatattcatccacatactcattaaatatatggtttaacccaatttaacgcaaaaaatcaatttacgatataatccatttgtctgagtaacgcctgttcaagcaggcttatgagtaagacgttttccccgtaatgtgttttgccatctatacttctccccttgtatagatggtttttttatagtggattaaatttaaaccagtacagcgttgcctcgccttgccgtactatttgtactgtctgcggcttcgtcgccttgtcctgatttttgttaatccactatatttcaaattccctctctttcatcattatttaaatgctatcattaatataattaacaaaatttcatttccatacaccgatgtagaagaataacaaattaatctatttataaactccgattcttcctcatcgggttatactcatcagaaatactcactgaaatatatgccttttacatggaaaatcactagacagttgaaaagcaatcagtcagttcctgttaaaaaacgcgtgtagaatttccgctttatctcaatcggacacggtttcaatatgtcttccccttcaaataccaatcgtcaaacctggtccagccgattaacctatatcctgaccgttgccggcgcgactgtcggtttcggcgcgacgtggcgtttcccgtatttggtcggtgaaaacggtggtgcgcgtatgtgtttttattctgtatcgcgatgctggttatcggcatcccgatgattttggtggaaaatgtcatcggacggcgcaaaggcgtgaacgcgctggatgcgttcggcggcccgatgaacggcaaacccattgccaaaatttggaaactggtcggctggatgggctgctcggcgcgttcggcatcatggcttattacatggtactcggcggctgggtaatcagctatatcgttaatattattggaggaaatttgaatatttccagccccgtcgacggtgtggttacaaaaggcttctttgccgaacacattgaaacagcccttgggaaattgcgttttatacgctgctttttgtcgccgtgaaccaatggattttggtcaaaggcgttatcggcggcattgaaaaagcggcaaaatagctgatgccgctgctgtttttgttcctaatcgcgatggtcgtccgcaacgttacccttccgggcgcaatggaaggggttgctttctatctgaaacctgatttcagcaagattaccgccgaactgttcgtcttcgttttggggcaggtattttttgccctgagcttgggtttcggcgtgatgattaccttgtccagctatttggataaaaacgaaaatctggttcagacggcagttatcacggcaattaccaataccatcatcgccatacttgcgggctttatgattttcccgtcgctcttcagcttcggcgttgcccccgattccggcccgactttggtgttccaaagcttgccgattgtgttctcacatatgtgggcgggatctgtgttcgccgtgattttcttctcgctgctcctgattgccgcgttgacaacttcgctgaccatttatgaagtgttgattacgaccattcaggaaaaaaccaaaatccgccgtaccgccgcgattacgattgtattggctgccatcttcattttcggcaacatcccgtccattctgagctatggtccgtggaaagacgttccgtgttcggcaaaaatattttcgatgccttcgactacatcagcggcaacatcttgtttatgctgaccgcgctcggttccgcgctgtttgccggttttgtgatgaaggacgaagcgaaggacgaattgctttataaaggcaaccatacgacggtcaatatttggtttgcttatgtgaaatatcttgtgccgctggtgattctgctgattttcgtcagcaacctgttctaatccgcagcaatcgatgccgtctgaaggtcatacctctttcagacagcattgccttgatgcccgccacaatacccgcaacgccgaaatccgaaccggcttgccggcttctgtcggatgtttccgggcaggcggcgttccgtctgcttagacaatcgtcctttaaaacaggtagaatccgccccaacgggaaacacatccttcagacggcaaaacccataccccaaaccatcaggaatcccccttatgaacagacaaaaagtcatcgccatcgacggcccgggcgcatcgggcaaaggcacggttgccgcccgcgttgccgccgcattgggatacgattatctcgataccggcgcactctaccgcctgactgccctatatgcacaaaaacaaggcgtgggatggcacgatgaagaaaacgtttccgaactggcaaaaaaactgcccgccgtattttcaggcagccgcatcctgctcggcggcgaagacgtttcagacggcatccggacagaagccatcggcatgggcgcatccgcagtcgcacagttgcctaaagtccgcgccgccctgctgcaacgccaacgcgattttctgaccgaaaaaggactggttgccgacggacgggacaccggatcggtcgtcttcccccaagccgaacttaaaatcttcctgacggcagaatccaaaatccgtgccgaacgccgcgccaaacaaatcggcatcccctgcgaaggtttggcattcgagcgcatcctgtccgacatcgaagccagagacgaggcagaccgaaaccgcaaagttgcccccctgaaacaacagcccgatgccctgcttttggacacaagccgcctgactatagaagaaactgtaaaaaaagtgcttgattggtatcgtgaagtttaaattttcaggtataatcgcacaaattacgtttcagacggcataaaaatcccccatatgccgtctgaaaccttatgtacccgtctgccctgccaaggacggcagatatccaccaacccaccccgcaccccttggcggtgtaccgaaaagagttatatatgtctatggaaaattttgctcagctgttggaagaaagctttaccctgcaagaaatgaacccgggtgaggtgattaccgctgaagtagtggcaatcgaccaaaacttcgttaccgtaaacgcaggtctgaaatcagaatccctgattgatgtagctgaattcaaaaacgctcaaggcgaaattgaagttaaagtcggcgacttcgttaccgttaccatcgaatccgtcgaaaacggcttcggcgaaaccaaactgtcccgcgaaaaagccaaacgtgcagccgattggattgccctggaagaagccatggaaaacggcgacatcctgtccggcatcatcaacggaaaagtcaaaggcggcctgaccgttatgattagcagcatccgcgcattcctgccgggttctttggtcgacgtacgtcctgtaaaagacacttctcacttcgaaggcaaagagatcgaattcaaagtgatcaaactggacaaaaaacgcaacaacgtcgttgtttcccgccgcgccgttctggaagccactttgggtgaagaacgcaaagccctgctggaaaacctgcaagaaggctccgtcatcaaaggcatcgttaaaaacattaccgattacggtgcattcgttgacttgggcggcatcgacggtctgttgcacatcaccgatttggcatggcggcgcgtgaaacacccgagtgaagtcttggaagtcggtcaggaagttgaagccaaagtattgaaattcgaccaagaaaaacaacgcgtttccttgggtatgaaacaactgggcgaagatccttggagcggtctgacccgccgttatcctcaaggcacccgcctgttcggcaaagtatccaacctgaccgactacggcgcattcgtcgaaatcgaacaaggcatcgaaggtttggtacacgtctccgaaatggactggaccaacaaaaacgtacacccgagcaaagtcgtacaactgggcgacgaagtcgaagtcatgattttggaaatcgacgaaggccgccgccgtatctctttgggtatgaaacaatgccaagccaatccttgggaagaatttgccgccaaccacaacaaaggcgacaaaatctccggcgcggttaaatccattaccgatttcggcgtattcgtcggcctgcccggcggcatcgacggtttggttcacctgtccgacctgtcctggaccgaatccggcgaagaagccgtacgcaaatacaaaaaaggcgaagaagtcgaagccgtcgtattggcaatcgacgtggaaaaagaacgcatctccttgggtatcaaacaactggaaggcgatccgttcggcaacttcatcagcgtgaacgacaaaggttctttggttaaaggttccgtgaaatctgttgacgccaaaggtgctgttatcgccctgtctgacgaagtagaaggctacctgcctgcttccgaatttgcagccgaccgcgttgaagatttgaccaccaaactgaaagaaggcgacgaagttgaagccgtcatcgttaccgttgaccgcaaaaaccgcagcatcaaactttccgttaaagccaaagatgccaaagaaagccgcgaagcactgaactccgtcaatgccgccgccaatgcgaatgccggcaccaccagcttgggcgacctgctgaaagccaaactctccggcgaacaagaataaggttgcagacatgacaaagtctgagttaatggttcgtttggcagaagtgtttgccgccaaaaacggcacgcatcttctggcaaaagacgtagagtacagcgtaaaagtcttggttgacaccatgactagatcgcttgcccgaggtcaacgcatcgaaatccgcggtttcggcagcttcgatttgaaccatcgtcctgcccgcatcggtcgcaatcccaaaaccggcgagcgtgtggaagtacctgaaaaacatgtaccccacttcaagcccggtaaagaattgcgcgagcgggtcgacttggctttaaaagaaaatgccaattaaaccttagcatcaaaacgccgctgttacgcggcgttttttctgtggtttaacttcatccgttgcttcaataccttgagccaagcaagcaacggattagagcgtggatttttttatagtggattaacaaaaaccagtacggcgttgcctcgccttagctcaaagagaacaattctctaaggtgctgaagcaccaagtgaatcggttccgtactatttacactgtctgcggcttcgtcgccttgtcctgatttttgttaatccactatatcattgcttacaatccgctttttaaacaacaaatttttgatttctattacgaacaggacaaaaatcctgcttattgcactaaaactaagccgtttcaggaatttgcggcaaatttacagcttttaccgagcctaatgctttcgctttttggtaaaacgccaatttgtattcaagcaaatctaaatagcgttttaattcggcaatttgacacttcacattttctatttgattttcaaacaaggaaaggcgttcttcaatggtatcgtcgccaatgacggtacattccgcaaagcgtttgatgtcttttaagctcattcccgtatttttcaagcattgcaataagcccaaccattgcaaatcgttatcggtaaaacagcggttaccgtattcatcacgtccgatattgggcaacaaaccttctttgtcgtaaaaacgtagggtgtgggcggagatgcctattttttcggcggctttggcagtagtataagtcattttccctccttctaaacaaaaacagtaaaaaacacttgctttagagttaactctaaagtgtaaactgttgctatgttgctcaggcaaggcaactttgtcaatgaattaagaggaaagacaatggaaatgaaacaagccgattcaaccatcaaatctcgtgcggcggtggcattcgcccctaaccaacccttacaaattgtggaaatcgacgtagaaatgccgcgtaaaggcgaggtgttaatccgcaatacccacactggcgtgtgccatactgatgcgtttacgttatcaggaagcgatcctgaaggcgtattccctgtggtgcttggacacgaaggtgcgggtgtggtcgttgctgtgggcgaaggtgtgtcaagcgtaaaaccgggtgatcacgtgattccgctttacaccgccgaatgtggcgaatgtgagttttgttgttcaggtaaaaccaacttgtgcgtctcagtgcgtgatacacaaggtaaaggcttaatgccggacggcacgacgcgtttttcttatcaaggtcagccaatctatcactatatgggctgttcgactttcagtgaatactccgttgttgccgaagtttcactggcgaaaatcaaccctgaagccaaccatgaacaagtatgtttgctcggctgcggcgttaccacaggtattggtgcggtacataatacggcaaaagtgcaagaaggcgactctgttgccgtgtttggtttgggggcgattggtttggcggtggtgcaaggtgcgcgtcaagccaaagccggccgcattatcgccattgataccaatccatcaaaatttgagttggcaaaacagttcggtgcaacggattgtttgaacccgaacgattacgataaaccgatcaaagatgtgttgttagacattaataaatggggcattgaccatacctttgaatgtatcggcaatgtaaacgtaatgcgtcaggcattagaaagtgcacatcgtggttggggtcaatccattatcatcggcgtagcaggtgcaggacaagaaatttcaacgcgtccgttccagttggtaacaggtcgtgtttggaaaggttcagcatttggcggtgtgaaaggtcgctctgaactgccgaaaatggtggaagattcaatgaaaggcgacattgagttagaaccgtttgtaacccacacaatgacactcgatcaaatcaataaagcctttgacttaatgcacgaaggtaaatcgatccgcgccgttattcactactaaggtatgcgatgaaactgattgaacaacatcaaatttttggtggttcgcaacaagtttgggcgcatcatgcccaaacgctgcaatgcgaaatgaaatttgccgtctatttgccaaataatccagaaaatcgaccgcttggtgtgatttattggctttccggcttgacgtgtacggaacaaaatttcattaccaagtcaggctttcagcgttatgcggcagaacatcaagtaattgtggtggcccccgataccagccctcgcggagagcaagtgccgaacgatgatgcttacgatttaggacagagtgcaggcttttatttgaatgcgaccgaacagccttgggcggcgaattatcaaatgtatgattacattttgaacgagctgccccgtctgattgagaaacactttcctaccaacggcaaacgttccattatgggacattcaatgggcggacacggcgcattggtattggcgctgcggaatcaggaacgttatcaaagtgtttctgccttttcgcctattttatcgccaagcctcgtgccgtggggagaaaaagcctttactgcttatttagggaaagaccgtgaaaaatggcagcaatatgatgctaactcactcattcaacaaggctataaagtgcaaggtatgcgcatcgatcaaggcttggaagatgagtttttgccgacacaattgcgtaccgaagattttatcgaaacctgccgtgcggcaaaccagccggtcgatgtgcgtttccataaaggctacgatcacagctattacttcatcgccagttttattggcgagcatattgcttatcacgccgcgtttttgaagtaaaccaaagagcgttcagtgttcaaagcagttttgggatagccggcacgagggcggtaagaagtgccggcataaacgtatgccgtctgagccgaaaggagccgactctacggattatagtggattaacaaaaatcaggacaaggcgacgaagccgcagacagtacagatagtacggcaaggcgaggcaacgctgtactggtttaaatttaatctactataaaaggcatttgagctcatatctgcaccatattgaaacgccgcctttgcttatacccccttgtgcgcgtcattattcttttccacggaaaatgccaagtttgaaggaaatcatttataataccgacggtaagcattttctttcttagccgcaagaagtataacaaggttaaatatgagtaatagagaccaactttttaaagccccgccgtttgaaaaccacagcccgctgacctggtatcaggctgcctcacaactgcccaacttcatccgcgacgacgcgcaggcagccgccatcgaacacctcgatcggctttggaccgaattgatgatgttcaaacgcaaaagaaaccgttttttaggcaggagtttgcgttccccgcaagtccccaaagggctttatttctatggcggggtcggacgcggcaaaagctttctgatggacgcttttttcggctgcctcccgtaccgccgcaaacgccgcgtccactttcatgcctttatggcagaaatccaccagcggctgaaaaccctgaaaagcgaaagcaacccgttgaaatccgttgccgccgagattgccaaagaaacccgcgtattgtgttttgacgaatttcatgtcagcgatattgcggatgcaatgattttaggccgtctgctggaaaacctgcttaacgagggcgttgttttggtggcgacttcaaactacgcgccttccgaactctacccgcaaggtcaaaaccggagcagttttcttcccacaatcgcgctcatcgagtccagcctgaccgtcttaaacgttgacggcggtgaagactaccgactgcgtaccctccgccccgccgagattttctttacgcctgccaatgaagaaaatgaggcaaaactggcaaaactgttcaaagaaatgacaggcattaccgatttgaaccccggcatcagcaccatccacggtcgggagattccccacaaagccgagtccggccgtgccatatggtttgatttccgcgcactgtgcttcggcccccgctcacagtccgactatctgtatttggccgaacattatgaaatggtttttatttcaggtttggaacaactctcaccgcaagaaaaggcggaggcgcggcggctgacttggctgattgacgtactctacgatttccgggtcaaactgtgtgccaccggcgcggtagatgtcaaccatatctatacggaaggcgattttgccgaagaatttacccgcaccgccagccggatggtcgaaatgcagtccgaagtttatttggaacagccgcacctgaccctatctcccaaggcttcaggcggataagttatttttttgatagaataccgatttgattcttcttaagtaaaaataaggatatagcatggcgattgaacgtaccatctccatcatcaaacccgatgccgtcggcaaaaatgttatcggcaaaatatacagccgctttgaggagaacggtctgaaaatcgttgccgccaaaatgaagcagcttactctcaaagaggcgcaagaattttatgcggttcataaagaccgccccttctacgccggattggttgaatttatgaccggcggtccggttatgattcaggtattagagggtgaaaacgccgtcctgaaaaaccgcgaactgatgggtgcaactaatccttccgaagccgccgaaggcacgatacgcgcggactttgccacttcggtcagcattaatgccgtacacggttccgacagcgtggaaaatgccgctttggaaattgcctactttttcagccaaaccgaaatctgcccccgttgatacaatacaccgcccaactcctcttcagacggcataaatatatccatgccgtctgaaaactctgttgcaaaaggcttcaaatcaaacttgcctgccctgcaattttttatttgaagccttgatttaagaaaaacacaaacacatgaaaaccaatctgctcaactacgaccttcaagggctgacccgacattttgccgatatgggcgaaaaacctttccgtgccaaacaggttatgcgttggatgcaccaatccggcgcgcaaaattttgacgaaatgaccgatttggcaaaatcgttgcgccataaactgaacgaacaggcaggcatcgaaattcccaagctgatgatgtctcaaaaatcttcagacggcactcgaaaatggcttttggatgtcggtacgggcaacggcgtggaaaccgtcttcatccccgaatcggatcgcggcacgctctgcatttcctcacaagtcggctgcgctttggaatgtacattttgttcgaccggccggcagggcttcaaccgcaatttgactgctgccgaaatcatcgggcaattgtggtgggcaaacaaagcgatgggcgttacaccgaaaaacgagcgcgtgatttccaacgtcgtcatgatgggcatgggcgagccgatggcgaacttcgacaatgtcgttaccgccttaagcatcatgctggacgaccacggctacggtttgagccgccgccgcgtaaccgtttccacttcgggtatggttccccaaatggacaggttgcgcgatgtcatgccggtggctttggcggtttccctccacgcttccaatgacgaagtccgcaaccaaatcgtaccgttgaacaaaaaatatcccttgaaagaattgatggccgcatgccaacgctatctggtcaaagcacccagggatttcatcactttcgaatacgtcatgttggacggaataaacgataaggcgcaacatgcgcgcgaactgatcgaactggtcacagatgttccctgcaagttcaatctgattccgttcaatcccttcccaaactccggatacgaacgctccagcaatgagaacatccgtgtgttccgcgatattttgcagcaggcaggatttgtcgttaccgtacgaaaaacgcgcggcgacgacatcgatgccgcctgcggacagttggcggggcaggttcaggataaaacgcgccgccaacaaaaatggcagcagattttaatcggacaacaggggtaattatgccttttaagccatccaaacgaatctctttattactcgttcttgccttgggcgcgtgcagcacttcctaccgcccctcgcgggcagaaaaagccaatcaggtttccaatatcaaaacccagttggcaatggaatatatgcgcggtcaggactaccgtcaggcgacggcaagtattgaagacgccctgaaatcggaccctaaaaacgagcttgcctggctggtccgtgccgaaatctatcaatacctgaaagttaacgacaaggcgcaggaaagtttccggcaagccctctccatcaaacccgacagtgccgaaatcaacaacaactacggttggttcctatgcggcaggctcaaccgccctgccgaatctatggcatatttcgacaaagctctggccgaccccacctacccgaccccttatattgccaacctgaataaaggcatatgcagcgcaaaacaggggcaattcggattggcggaagcctatttgaaacgttccctcgccgcccagccgcagttcccacccgcatttaaagaactggcgcgcaccaaaatgctggccgggcagttgggcgatgccgattactactttaaaaaataccaaagcagggtagaagtccttcaggccgatgatttgctgctaggctggaaaattgccaaagccctcggcaacgcacaggcggcatacgaatatgaagcacaattgcaggcgaatttcccctactcggaagaattgcaaaccgtcctcaccggtcaataaacagattcaaaccatatgaacacactccaacgccgcaagacgcatcaagtccgcatcgatcatattaccgtcggttcagaagcacccgtcgttatccaatctatgaccaacaccgacactgccgatgcaaaagccaccgcattgcagattaaggaattgagcgatgccggatccgaaatggtgcgtattaccgtcaacagccccgaagccgcgtccaaagttgccgaaatccgccgccgcttggacgatatgggctatgccacaccgcttatcggcgatttccacttcaacggcgaacgcctgttggcggaatttccagaatgcggcaaagcattgtccaaataccgcatcaatcccggcaatgtcggcaaaggcgtaaaaggcgatgaaaaatttgcctttatgattcggactgctgctgaaaacgataaagccgtccgcatcggcgtaaactggggttctttggatcaaagcctcgccaaacgtatgatggatgccaacctcgcttcttccgcgccgaaaccgcccgaagaagtgacgaaggaagcactgattgtctccgctttggaatctgccgaaaaagccgttctattgggactgcccgaagacaaaatcatcctgtcgtgcaaagtcagcgcggttcaggatttgattcaggtttaccgcgaactgggcagccgttgcgcctatccgctgcatttgggtttgaccgaagccggtatgggcagcaaaggcattgtcgcatcaacggcggcattatccgtcttgcttcaagaaggaatcggcgacaccatccgcatttcactgactccggaacctggcagcccgcgtactcaggaggtcgtcgtcgggcaagagattttacagactatgggattgcgttcgtttacgccgatggttaccgcctgccccggctgcgggcgtaccaccagtaccgtatttcaagagctggcacaagatgttcaaaattacctgcgccaaaaaatgtctatatggcgtaccctttatcctggggttgaatccctgaacgttgccgtaatgggctgcgttgtcaatgggcccggagaaagcaaattggccgacatcggcatcagcctgcccggtacgggagaaacacccgttgcccctgtttatgtagatggtgaacgtaaagtaacgctgaaaggcgacaacattgcaacggaatttctggctattgttgaagagtatgtcaaaaccaattatggggagaacggactcaaacgccatcaagggaaggttatcccgatacactccctataaaatccaaccgccagcctaccttggctatttttaaataaaaaccgtttattttcattgatataaaacccatcccattggaaaaggcatttttttaaaccgataaggaatggaggcgcaatatgaaaatacaatcggcaaatacggagatgaattgcaggtataaataaggaaggcgggataccgcttcctgcccttgtcttttctcaataaccgtaccggcagattcaggaggatgcgagtgtcgcgcccttgcaaaaactgctgccccatttggctttcagacggcatccgtccatcacaggcgggaacggggatcctttaaaaaactccaaatccttcttccgtcccgtggatgacggtatcgataccatatcaaacgcagcttgaaacaaatgccgtctgaacgtttcagacggcatcggtttctctcaggtttcttttattaaagccgcaaagaagcgcggttttccaaaatctggtcaatcaaaccatattctttggcttcttcggcagacatgaaattatcacggtcggtgtcgcgttccaaatctgccaaatcgcggtcgcaatgtttcgccatcaggcggttgagtttttctttgatttttaaaagttcgcgtgcgtgaatttcaatgtcggatgcctgaccgcccagaccgccgctgattaaaggctggtgaatcataatccggctgttgggtagggcaaaacgtttgcctttctcgcctgccgacaataagaacgcgcccatacttgccgcctgccccaagcacaaagtcgatacatcgggcttgatgaaattcatggtgtcgtaaatcgacataccggccgttaccgaaccgcccggcgagttaatatagaagaaaatatccttatccggattctcactttccaaaaacaacagttgggcaaccaccagattggcggactcgtcggttaccggtccgaccaagaatacgatgcgctctttcaaaagccgggaatagatatcgaatgcacgctcaccgcgaccgctctgctcgataacggtagggacaagatagttatcaaaagacatttcgtctcctttcatgatggaaaagcaccaaagcgagctttaaaagcggcttcggtgctttcaaaaactgccttcagacggcattttcaggataatcaggcttgcgcgcccatcacttcgtcaaaagacaaagctttttcatttactttggctttgcccaaaacgaaatcaacgacgttgctttctaccgccaaagaagtcggggcttgcaggcgggaaggatctgcgtagtaccagtcaatcacttcttgaggatcttcgtagctttctgcaaagttggcaacaacggctttgatttgctcttcagtcggttccagtttgttttcgtcaaccagtttggctaaaatcagacctaaagatacgcggcgttcggcttgttctttgaacatatccaaaggcagatccaagttggcagcatcagccataccttggttaacaaaattttgtttcatttcgtttgccaagcgtgcggcttcttcattgaccaaagcaacaggtgctttcagctctacggctttgagcagcgcgttcattacggattctttggtttgttcgtttacgcggcgttccacttcgcggcttacgtttttctgcacttcttcgcgcattttggcaacgtcgccatccgcaatacccaaggcttttgcaaaatctgcatcgacttcaggcagagtcgcttcggaaacgttgttcagcgtaatggtaaacacggcagttttaccggcaacgtctttaccgtggtagtcttcagggaaattgacggtaacgtctttactttcgccagccttcatgccgactacgccggcttcaaattcaggcagcatttgacttgcgcccaatacgaaggcgtagtttttggatgcgccgccggcaaaaggttcgccgtcgattttgccttcaaagtcaatgatgacgcggtcgccgtttcgggcttcgcgttcgacatggttgaagcgggtgcgttgtttgcgcaggatttctacggtttggtccacttcggcatcaccgacggaagcggttactttttcaacttcttgtgcagacaaatcgccgataacgacttcggggaacacttcaaaaatggcggcaactttgaaagactctttatcgtcttgttcttcaacgccttcaaaacgggggaagcctgccactttcaactcttgggcaacggcaacatcgtagaagcggcgttgcaccagctcgttgatcacgtcgttttgtgcgctcgcaccgtacatttgggcaatcatttttaaaggtgctttacccggacggaaaccgtcgatttttgcacggcgttgggtttgtttcagttttttatcggtttctgcgttgatttcggaccaaggcagggacaacactactttgcgttccagattttctaaagtttcaacagttacgctcatcataagcccttaaatttgttgtgttgataaaatgataaactttcttccctacatggggaagcaaacagcgcaacggtacgatatttgaaccgcattgccgcaaaggggaaattttagctggcaagtatatcacaatgtttcgcctgaaacataatatgccgtctgaaacgccaattccgccgttcagacggcattttgcaatacgggctacaaatggtccttgtgcgccaaaattttacggctgccgttgaggtcggtggaagaaacgacacccgcattttccagtgcctccatcaggtttgccgcgcggttatagccgatgcgcagctgccgctgcaaagacgaaatggaggtttttttgctttccaaaacataggcgactgcctgatcgaacaattcgtcgctgtctgcattcggattaacgatattggcagtttccagcgcggcctcgccgctgagcagaccttcaatatagtcggctggggcttgcgatttgacatagttgacgacttgatgtacttcgtcgtctgaaacaaacgcgccttgcaggcgagtcggttcggcactgccgggctggaggaacagcgaatcgccatatttgagcagttcgtccgcgcccatttggtcgaggatggtacggctgtcgattttgctttgcacggtaaacgccatacgcgtcgggatgttggctttaatcaggccggtaacgacatcgacactgggacgttgggtggcgacaatcatatggataccggcggcgcgcgctttttgggcgagacgggcgatttgctgctcgacggctttgcgttcggtcatcatcaggtcggcaagttcgtcgataacgaccacaatcaacggcagtttttccagcggctcgggctcgtcggggttcaggctgaacggattgagcagcggcttgcctgccgcttttgcggcttcgactttttggttgaagccctccaaattacgcacaccggcatgggaaagcaggcggtagcgtttttccatttcggcgacgcaccagttcaacgcctgccctgcttcgcgcatatcggtcacgacgggacagagcaggtgcggaataccgtcgtaaatgctcaactcgagcattttcgggtctatcataatgaagcggacttcgtcgggcgtagctttgaaaagcatagacataatcatgccgttcacgccgacggacttgcccgaaccagtcataccggcgaccaaaaggtgcggcattttcgccaagtcgccgacaacgggggtaccggcaatgtctttgcccagcgcgacggtcagcttggatttggcttcggcaaacacgggcgaggacaagatttcactcaacatcacgtcttggcgtttgtcgttgggcaactcgatgcccatcgtgtttttacctgcgatggtttcgacgatacgcacggactgcagcgacatagagcgtgccaaatctttcgacaaggcaacaatttggctgcctttaacaccttgcgcgggttcgatttcgtagcgcgtgatgacggggccggatgtggcggatacgacttgtacgccgatgccgaattctgccagtttggattcgatcagttcggcagtgcgctccaattcggcgggattgatgctgacgggttcgctgtcaggaatccgcaataggttcaatgtaggcttgtggtattcgcccgcctgccgaggttcgtcatcttcaaacagagaaacctgaattttgggcggcggcgcgacggaaaccgcgacggatttgcggttgctgctgctgccttcgggcaaggcaacgggtttggccgtaatattcttggcttcttttaccatgcgccgtgtattttgggtatcgacaccgtctgttttggtattcggccggcgttttcctaaagccatgaccttgccggataaggcactcaggcggttttgaaccgccctgcccgcaccgttcaaaaattccagccatgaaatctgcaccagcagggacaacgacaacagcagaacaaccaagataatcagcaggctgcccgatttccccagcagccacgcaaacactgcgccgacgcgtatgccgaccataccgcctgctccgacaggcagggagtcggcatattttccgcccagcacaaaatactccaagacggggctgaagaccgtcaggacaaacagcgcggcggcagcgattttgtggttgtatgcctcgttttccgtctgttttgcgtgcaggcggaaatttttatacagcacgacgcaggcagccgctatccaccaccagaacgaccagccgaaaagataatagccgacatcggcaacatacgcgccgaacagtccgccccaattggcgacatcttccacaaccggcgaactgtgcgaccaagacggatcgcccatatcgaaactgatcagggaaatcgccaaatacagggttgccgccaaacccatcagccacagtgcgtcgccgataaggttgacgacatgttcgggacgcgcctttttggtttcggttttctgcaactctttgaccgccttgagccgctcggaaactttattgccccgtgcgccgttgtcggctttcttgttgcgtgcggacgttggggacgggcttcccgccctgccttttgctgtttttttatgggatttttctgtcatgccgtattaccggaaaatgccgtctgaaataaggaagccggacggcttgcggattgaatatggaaagtgtcggattatactccatttctcctgctttcatcctgcaacagacagacattgcctttcagacggcatatctgttgcccgacgtatgtatttttacgcagaccctcggcaaaccagtataatccgtgccgtttgaaccgattgaaagaagatggtatgaaccaactgaaacttgccgtttccggtgcacagattttatttgtggcattcggcgcaatggtgctggttcccctgctgaccggtctgaatccggctcttgcgcttttgggcgcaggcttgggaacgctgctgttccaaatcacaaccaaacgcaaagtgccgatttttcttggttcttcgtttgcctttatcgcaccgattatctactccgtcggcgaatgggggctgccttccaccatgttcggactgtttgccgccggctttatgtattttgtgtttgccgcgctgatccgttggcgcggactggcagcggtacacaaactgctgcctccggtcgtcatcggccccgtcatcatggtcatcggtctgtctgttgccgtggcggcaagcagcatggcaatgggtcaggcggacggcaaacaggtcatcgactataccgattcgctgattctttccggctttacctttgccgttaccgccatcgtatcggttttcggcagcaggatgatgaagctgattcccatcttgatcggtgtcgcttcgggttatgttttggcactgctgatgggactggtggacacggcaagcattgcacacgcgccctggttcgccgttccccattttgaaacgcctcagatcaactggcaggctgcactgtttatgctgcccgttgccgtcgcccccgccatcgaacacatcggcggcatcatggcaatcggcaatgtgacggggaaagactatacgaaagacccgggcttggacaaaacccttgcaggcgacggtttgggcgtatgcgttgcgggtctgatcggcggcccgccggttacgacctacggcgaagtaacgggtgcggtgatgattaccaaaaacagcaaccccgtcatcatgacttgggcggcggtttttgccgtctgcatggcgtttttcggcaaattcaatgcgtttttggcttccattccgatgccagtaatgggcggcattatgctgctgctgttcggcacgattgcttctttgggcgtgaaaacgctgattgatgccaaagtcgatttgatgctgccgaaaaacctggtcatcgtcagctcggtactgaccacgggcatcggcggcatgacgctcaaattgggcagcttcagctttgccggcgtgggcttgtgcgccgtacttgccattatgttgaacagcctgctgcccgatccgaaagaatcctgaccgtcgatatagaaatgccgtctgaacatctttcagacggcattttccgttttatttgagattttgaatcaaagagcgcacagttccgccgtaataagaagaagatgtgcaatacactgtttccaagccgcattgtccctgtacgccgtattttttgatgcactggttgagtgcgacctgatgaacgctcgtaaaacgcggagaagtaatcacgacggcgttgtcgacacgcagcgcgcccaaggctttcgggtatgccagcgcgacacaggtattgttcagcgacacgaccgaccggcatccggtcggctcgtcttcagcaatgcccgcaagcgtgtcctgacctttgcagaaggcttccaactcggaaaacgcttcgcttttcgtcgaatcttcttttgtggttttaacctgcaaaacatcgtccgcattctgcggattctgccaaacggcgagatagccgtaagtatcggcagcccgtgccgccgcagtcatcaggcatagtgccgatacggccagtatctttttcatcatgataaattcccgacggttcgtccaaattctgttgcattataaacaaaaaacaggataagtcccgccttatcggcttatccctccccgcagattgcaccgccgggtatggcaaaccgatttcagcagcgcaaatccgcataccgccgccttagcggcaagccgttgttttcagacggcattgcggccaacctttgcggcgggcgaaaaaccttgtcctataatttatcccgtttcaaaatcagcatacggtcggaaatgcaaaaaatatctttcaatttgttgaagcctgcaaactccccgaaaatagggaaacgccgccccggtttgaacggcgcgccgcatattccgatgccctccccccgataccttccggcaagcccagaaatgcccggcaacaacatccatccggcaaaaatccgaaacaacacacccggcggcaggcagagtcaaaccgccccgcaaagcatccgccatcagaaaaacaaaccgcctccgagggcttcatcctaaagggcgtattgttcgataatggtttgggttataatcccctatcgattctccacgtccgtgagacacttcagctatggaaaccccgaccaacaccccgcaacgctccctgcgtcaaaacagtatctacctgctgcccaattcctttactatcgccgcgctgttttccgcgttttacgcaatcacccaatccatgcacggacgttatgaaaccgccgccatcgcggtattcatctctatgttgctggacggtatggacgggcgcgtggcgcggctgaccaacagccaaagcgcgttcggggagcagctcgacagccttgccgatatggtcagcttcggcgttgctcccgctctgattgcctacaaatggcagctttggcagttcggcaaaatcggttattccgtcgccttcatctactgcgcctgcgccgccctgcgcctcgccctgttcaacacactcatcggcaaggtggacaaacgctggtttatcggcgtgcccagtccgactgccgccgcgctgattgtcgggctgatttgggtcaaccacagcgtcgaaaaattccccgccgtccactggtgggcattgggcatcacactgtttgccggcctgtcgatgattgtccaaatccctttttggagttttaaagaaatcaacatccgcagacaagtcccctttgtcggaatgctgcttgccgtcttactgctgcttctggtcacttgggaaccgtcgctcgtcctcttcctgttctttctcggatacagcctgtccggctacattatggcggcacgccgattttggaaaaagtacagaaaggcggattaaatgtggcattgggacattatcttaatcctgcttgccgtaggcagtgcggcaggttttattgccggcctgttcggcgtaggcggcggcacgctgattgtccctgtcgttttatgggtgcttgatttgcagggtttggcacaacatccttacgcgcaacacctcgccgtcggcacatccttcgccgtcatggtcttcaccgccttttccagtatgctggggcagcacaaaaaacaggcggtcgactggaaaaccgtatttacgatgatgccgggtatgatattcggcgtattcacgggcgcactctccgcaaaatatatccccgcgttcgggcttcaaattttcttcatcctgtttttaaccgccgtcgcattcaaaacactgcataccgaccctcagacggcatcccgcccgctgcccggactgcccggactgactgcggtttccacactgttcggcacaatgtcgagctgggtcggcataggcggcggttcactttccgtccccttcttaatccactgcggcttccccgcccataaagccatcggcacatcatccggccttgcctggccgattgcactctccggcgcaatatcgtatctgctcaacggcctgaatattgcaggattgcccgaagggtcactgggcttcctttacctgcccgccgtcgccgtcctcagcgcggcaaccattgcctttgccccgctcggtgtcaaaaccgcccacaaactttcttctgccaaactcaaaaaatcttcggcattatgttgcttttgattgccggaaaaatgctgtacaacctgctttaaaacacacgaaaaaacctttttaccgtttgcacaagcaattaatcaggacaaagctgcccagtctcctgttccgacaaaaggacagacaacctgaccgagacctttgcagaatatacgaaaaacaaaacaaataccgtctgaaaccacattccgacaatcggcagggtttcagacggcatctgataatttcaattactcggttgcggcaacgacggcaacggtaattttagcaacggcatcagtgtgcaaagccacttccacttcgtactcgccaacggctttcagaggaccgttcggcagacgtacatttgctttcacggcttcgatgccggcagcaacgattgcagcagcaatgtcggcattggtaacggaaccgaacaggcgaccgtccacaccagctttttgagcaacggtaacggtttgaccgtccaatttttcctgacggactcgggcatctgccaaaatttcagcctgtttggcttccagttctgcgcggcgtgcttcaaactctttcatattcgcttcggtcgcacgttttgccttacctgcgggaattagaaagttgcgggcgtagccgtttttaacggttacgatgtcgcccaagttgcccagaccgccgattttttctaacagaataatttgcatgattcaatctccaaaattatttgtgttggtcggtgtaaggcagcagagccaggaagcgtgcgcgttttacggcaacagccaattggcgttggtagaatgccttcgttcctgtgatgcgtgcaggaatgattttaccgttttcggagatgaagtctttcagcaaatcaacttgtttgtaatcgacttcttggattttttcagccgtgaaacggcagaattttctacgtttgaatgattgacgagccattgtcgtttaacctttatattcttgaatattttgtatcctgagcatcggcataagggaacgtctgcttttttgagctaaaaaaccttcgacgtgaacatatacaccttgccgatactgccactcttccgcctgcctgcctaaaatccgtgccggaatttccaattggacaaggcattgctgcccgttttcctcctgccacgattcgtgctttaaaataatatctaaaacagggattccggcaggcgtatatcgaatagggaaaaccttttcaattaacgcggcaagcgaaacaagattattgaatcccaattattgggcgaccgcttcttcagacgcaccgctcaacaggttcttagccttttcaccacccaacataggggatgcttcggtaacggcgtgtttggttttgatggtcagatgacgcaatattgcatcattgaagcggaatgcggtttccagctcttcaaccacttcgggagtggtttcgatgttcatcaaaacgtaatgggctttatggattttgttaatcgggtaagccagctggcggcgaccccagtcttccagacggtgaatcttaccgtttgcttcggcaatcatggttttgtaacgttcaaccatagcgggtacttgctcgctttgatcgggatgaacgataaacacgatctcgtaatgacgcatgttatctccttatggatggtaaaaacagccttctgccatgcgaaagcagaaggcaaggtttaaagaagcggcattatattggggtttgccgacggaatcaaggatttggtgcgaaaaatttgcattccgccgaaaatttcggtttcagacggcattcaaatgttttggctgcccagccagcgttccgcgtccaaagccgcctgacagccggaagccgcgctggtaatcgcctgacggtaggtatggtcttttacgtcgcccgccgcccatacgccttcgatattggttgcgccgacattgtccgccgtgccgcctttggttttcaggtaaccggcttcgtccatttccaactgacctttgaaaatatcggtattcggcttgtgcccgatggcgataaaaatgccgctgacggcaatttgttgctcagaaccgtcgttgttttttaataatgcgccgtttacgccccgatcgtcgcccagtacttcttgcaggttgctttccagcttgaggatgattttgccctcttccacgcgtttcatcagtttgtcgatcatgattttttcggcacggaactcgctgcggcggtggatcagggtaacggttttggcgatattggcaaggtagagtgcctcttcaactgccgtattgccgccgccaactacggcaacatcttggtttttatagaagaaaccgtcgcaggtggcacaagcggaaacgccttttcctgcaaacgcttcctcactcggcaaaccgaggtatttggcggacgcgcctgttgcgacaatcagggcatcgcaagtgtactcgcccatatcgcctttgagtgtaaacgggcgtttttgcagatcgacggcgttgatttggtcaaaaatgatttccgttccgaaacgttcggcgtgggcgagaaaccgcgccatcaattccggcccttgcacgccgtcggcatcggcaggccagttgtccacttcggtggtggtcatcagttgcccgccttgcgcgatacctgtaataatgacggggtttaaattggcgcgcgcggcatagacggcggcggtgtatccggcggggccggaacccaaaataatcagtttgcggtgttgggacattgtttttcctttgctgtgtcaagttttcggattctactcgaattatcggcgcgtttgagaaatttcgaccataccggcgctcagacggcatcccgcagccttaactgccgtctgaatatcaaagcaggaatcacgcttatgcaacaaaaaatccgtttccaaatcgaaggcatgacctgccaggcctgcgcttcgcgcattgaaaaagtgttgaacaaaaaagattttgtcgaatcggcgggggtaaacttcgccagcgaagaggcgcaggtagtgtttgacgacagcaaaacctcagtagccgacattgccaaaatcattgagaaaaccggttacggcgcgaaggaaaaaacggaagatacattgccgcaacccgaagcagaacaccatatcggctggcggctgtggctgctgttcaccatcaacgtcccgttccttatcggcatggcggggatgatgatcggcagacacgattggatgattccgccgttgtggcagttcgcattggcaagcgtggtgcagctttggctggcaatcccgttttacaaaagcgcgtgggcgagcattaagggcggactggcgaatatggacgtgctggttaccatcggcacggtctcgatttacctgtattccgtctatatgctgtttttcagcccgcacgcggcgtacggtatggcgcatgtgtattttgaagtgggcgtgatggtgatcggttttgtgtcactgggtaaatttttggaacaccgtaccaaaaaatccagcctcaacagcttgggcttgctgctcaaacttacaccaacccaagtcaacgtgcaacgcaacggcgaatggaaacagcttcccatcgaccaagtgcaaatcggcgaccttatccgcgccaaccacggcgaacgcattgccgcagacggcatcattgaaagcggcagcggttgggcggacgagagccatcttaccggcgaatccaatcctgaagaaaaaaaggcgggcggcaaagtgttggcgggcgcgttaatgaccgaaggcagtgtggtgtaccgcgccacgcagctcggcagccaaacccagctcggcgacatgatgaacgcgctctctgaagcacaaggcagtaaagcaccgattgcgcgcgtagccgataaagcggctgcggtattcgtgcctgccgtcgtgggcattgcgttgttgacttttattgttacttggctgattaagggcgattggacggttgcgctgatgcacgccgtcgccgttttggtgattgcctgcccgtgcgcgctgggtctggcaacccctgccgcgattatggtcggtatgggcaaagcggttaaacacggtatttggtttaaagacgcggcagcaatggaggaagccgcccacgtcgatgccgtcgtgttggacaaaaccggtacgctgaccgaaggcagcccgcaggttgccgccgtttattgcgttcccgacagcggctttgacgaagacgctttgtaccgcatcgccgccgccgtcgaacaaaacgccgcccatccgctcgcccgtgccatcgtctccgccgcccaagcgcgcggtttggacattcccgccgcacaaaacgcacaaaccgttgtcggcgcaggcattaccgccgaagtggaaggcgtgggtttggtgaaagcaggcaaagccgaatttgccgaactggccttgccgaagtttttagacggcgtttgggatattgcaagcattgttgcggtctcagtcgataacaaacccatcggcgcattcgcacttgccgacgcgttgaaagccgataccgccgaagccataggccgtctgaaaaaacacaatatcgatgtctatattatgagcggcgacaaccaaggcacggtcgaatacgtcgccaaacaactgggcatcgcacacgccttcggcaacatgagtccgcgcgataaagctgccgaagtgcaaaaactcaaagccgccggcaaaaccgtggcgatggtcggcgacggcatcaacgacgcgcccgcgcttgccgccgctaacgtcagcttcgccatgaaaggcggagcggacgttgccgaacataccgcatccgccacgctgatgcagcattcggtcaaccaactcgccgatgctctgctggtgtcgcaagccactttgaaaaacatcaagcaaaacctgtttttcgccttcttctacaatattttgggcattcctctcgccgcgcttggctttttaaatcccgtcatcgctggcgcggcaatggcggcaagctcggtttccgtgttgagcaatgccttgcgcctgaaacgggtaaaaatcgattagcagcatgtaaccgccctgcagccttgtccgaacggataaggctgtctccagcgatatggtaatatgccgtctgaaaccgtttttcaagtaattgatatgaataaagaaacccgttttccggaacacttcgacatcccacttttcctcaaaaacctgcccaacctgccaggcgtataccgttttttcaacgaaagcggcaacgtcttatacgtcggcaaagccgtcaacctcaagcggcgcgtgtccggctatttccagaaaaacgaccattccccgcgcatcgcattgatggtgaaacaggttcaccacatcgaaaccaccatcacccgctccgaatccgaagccctgattctcgaaaacaacttcatcaaagccctgtcgcccaaatacaatattcttttccgcgatgacaaaagctatccttatttgatgctcagcggccatcaatatccgcaaatggcgtattaccgcggcacgctgaaaaagcctaatcaatatttcggcccatatcccaacagcaacgccgtgcgcgacagcattcaagtgttgcaaaaagtctttatgctgcgtacctgcgaagacagtgtattcgagcatcgcgaccgtccttgtctgctttaccaaatcaaacgctgcaccgcgccttgtgtaggccacatcagtgaagaagattatcgtgacagcgtgcgtgaagccgcgactttccttaatggcaaaactgacgaattgacgcgtaccctgcaacacaaaatgcaaaccgccgccgctaatctacaattcgaagaagccgcacgttaccgcgatcaaatccaagcgctcggcatcatgcaaagtaatcagtttatcgacagtaaaaatccgaacaatcccaacgatatcgatttgcttgcactggcggtttcagacggcctggtttgcgtacactgggtcagcatccgcggcggacggcacgtcggcgacaaaagctttttccccgacaccaaaaacgatcccgagccaaacggacaagattacgccgaagccttcgtcgcccaacactatctgggcaaaagcaaacccgacatcatcatcagcaactttcccgttcccgatgcgctaaaagaggctttggaaggcgaacacggcaagcagatgcaatttgtcaccaagaccataggcgaacgcaaagtccggttgaaaatggcggaacaaaacgcgcaaatggcgattgcacaacgccgcctgcaacaaagcagccagcaacaccgcattgatgaactggcaaaaatcctcggcatggattcagacggcctcaaccgccttgaatgtttcgacatcagccacacacaaggcgaagccactattgcgtcctgcgttgtgtacgatgagcaaaacatccagccttcgcaataccgccgctacaacatcacgaccgccaaacccggcgacgactacgccgccatgcgcgaagtgttgacgcgccgttacggcaaaatgcaggaggccgaagccaacggcgagaccgtcaaatggccggatgccgtgttgattgacggcggcaaagggcaaatcggcgtagccgtatcggtatgggaagaactcgggctgcacatccctttggtcggcattgccaaaggcccggagcgcaaagccggtatggaggagctcatactgccttttaccggcgaagtcttccgcctgccgcccaacagcccggccttgcatctattgcaaaccgtacgcgatgaatcgcaccgtttcgccattaccggtcaccgcaaaaaacgcgacaaagcccgcgttacctcctccttaagcgacatccccggcgtaggcagcaaacgccgccaagccctgctcacccgcttcggcggtctgcgcggcgtgattgccgccagccgcgaggacttggaaaaagtggaaggcatcagcaaggcattggcggaaacgatttacaatcatctgcattagcatgctgtcaaagacaaaatccgtctgtaaaaaatatgatacagcaggtcggtataccgatatatagtggattaaatttaaaccagtacggcgttgcctcgccttgccgtactatttgtactgtctgcggcttcgtcgccttgtcctgatttttgttaatccactataaacctaacttcataacgaataacgatgattcgacaaaacggaaaacgatctgacatgaacaatcccgacttaccctatcggcaggccttagaatgcctgtctcaaaaacaatataactttaccgaagtccgccgactgctgacagaagcgttctcggcaggtcatcccgccgccgcattcgagttggcaaaacacctgatggacgcggacagcccctaccaagaccgcgaacaaggtatggaaatgctccgcatcgccgctgaacagggacatccctacgcgcgttacaatctggcatatatccaagaattggaaggcgcacccccggaaaccctgataccgctttacagaccgttggcagaagaaggactgcccgaagcgcaagtccgcctgatgtaccttctgtacgcgtcccgacattttgaagaagccttggaatgggcaaaaacaagcgcaaaaaacaacaacccccacgggcaatacctgcttgcccaatactgccggtacggcacaccgccggattttgaaacggcgcacctgctctaccgaaaatcggcggcacaaggcttgccggaggcacattggcagctcgggctgcaatatcgtttcgggcaagggacgaaagtcgacacggcacaggccgtcaatcatttgcgcgccgccgcacaacaaggatacattcctgcctacaccccacttgccgagctcatcctacctacggctcctgatgaagccgttcactggtttcaacaggccgcacaggaaaatgaccccgatgcccatgccgcacttgccgacatctacctgcaaggcaagcatctggaaagaaaccacaaacttgccctgcatcatgccgaagcagccgccgccgaacgccatcccgaaggtttgcggatactgggcgacatctgccgctacggtttgggcatagcccccgatacggaaaaagcccggcattattatcggcaggcagccgaagccggcagcctttccgcctatcagaaactcatatccgacagcgcgttaaaccatcctgaccaatacggcggcattaaagattccgccatcaggcggcaaagggcagaacggctttatcaaaaagcccaagccctgcattacggattacaatgcgcgcccgaatacgcagccgcgctcaaactctacacagaagccgcagaactcggacacagcaaagcccaaaccaatctgggcagcatgtattacttcggacagggtatgaccgccgactacaatgaagcacgcaaatggtttgaaaaagccgccgcgaaaaaagacagtatggcgttctacaacctcgcctgcatccattacagcggacacggcgtcgagccggacaaagaaaaagcctgccgctacctgcaagaagccataaacaacggatacgggcaaaaaagcgtcctgcaagaactgctgcaacaatggcaaaatgccgtctgaacagcgttacacctaccctgccgaaacgaaacaggtataatcgcccctttcccttcccgccgtccgaacaggcatttcacattcagacggcatcctgattgcacaagcgtacgaaagcattatgacagacaccgccgagaaccaaacacaaaacaactggcaagccggacacccccgcagcatccgcagcttcgtcctccgccaaagccatatgaccgccgcgcagcaacgcgccatcgataccttatgggacagcttcggcatcgactaccaagcaacaccggccgatcttgatgcccgtttcggaagcagccgacccaaaatcctcgaaataggcttcggtatggggacggcaaccgcagaaatcgcccgccgcctgcccgaaaccgacttcctcgccatcgacgtacacggtcccggcgtaggcaacctgctcaaactcatagacgaaaaccatttagaaaacatccgcgtgatgcggcacgatgccgtagaagttgtcgaaaatatgctgcaagacggctcgctcgacggcatccacatattcttccccgacccgtggcacaaaaaacgccaccacaaacgccgtctgatacaagcccccttcatcgccaaactactgcccaaactcaaaaccggcggctatatccacctggcgacagactgggaagaatatgcacagcagatgcttgaagtcctcagtagcttcgacagcctgcaaaatacggcggcagactacgcccccaccccggactaccgccccgaaaccaaattcgaagcgcgcggcaaacgcctcggacacggcgtttgggacttggtattcaaacggatcggataacaaaccactgtttgaaaatgccgtctgaaacatgtttgcttacagacggcattttttcaagataaagcagcaagtgatgtttcgatataaagtttaaaacaatagtttgaacggcaaaacgcgtgtgtaccgcacgcatccttataggttttatgcacatcggttttaaagtttgtgccgcccgcaggtagtatgtgatagctacgcacgcggttggtgtgatgtaggctacggcttgctggttacaaccgtaaaaaagtaagtgccgccattgcggtaaaaacgaagggatttcatagtgttatgctcgtaatgattttgtagattggattctcgaatccgaccttttgggcattgctgcaatggattgcaacgacgggaatgttgaaggttttgtcggatacaagtatccgacctacgcttgttgctatatatcttttgatttaatgactaaatatgacaaagttaaagtgcagattacagcaagcatgatatgcttctttaggcttttatcattccatgatatagatatttcttccttttcattttctttataaaattttaaacctatatcaccatttttccattcctggtggtttactatgattttatttttaaaagaatctcttaaactttcatgtaaagagttaaattttcttgatttacttcccttagtacatggtgagcaattgtatttctaattttatttaatctctcccctatatcatatacttcgctaaataagccaagattacgcgcaatttttagttttgtgcgaaatccaatttgtgtatcattgaaaaaatcttctttattacattttgcatatatccatgcctctaaaattctttcaaaaaataaatgtgttcgtaagattgaacctatttcatcctgtgtttcaatagcttctttcacgatatcaaaaatcttataatcatcaaaatttgaatttttaataaataattctaaattaaaatctaattgagacataataagtgcccatttcaaaaataaatctatattctagttaatataatagttattctaatatctaaattaaataataaactactatttttatatccacgacaaagtctaagtctcactccgccccaaacaacaaattctctttaatatccctaatcctatcccgcaacacagccgcctcttcaaactgcaaatccctagccgcctgctgcatggctttttcgagtttggcgatttctttaatcgcatcttcttcgttgtgaatctcgcccactttaaccttgtttttacctttcagacggcctttactgccgtcttcttcgtggtacacgccgtcgatgatgtctttgacctgttttttaatctgctgcggcacgatgccctgttcttcgttgaatttaatctgtttttcacggcggcgttcggtttcgtcgatagcggctttcatggagtcggtaattttgtcggcgtacaggatggcgacgccgttcacgttgcgcgcggcgcggcctatggtttgaatcaggctgcggtgggagcgcaggaagccttctttatctgcgtcgaggatggcgacgagagagacttcggggatgtcgaggccttcgcgtaagaggttgatgccgacgagtacgtcaaacaggccgagccgtaaatctctaatgatttcaacgcgctcgacggtgtcgatgtcgctgtgcaggtagcgcactttgataccgagttcgctgtaatagtcggtgagttgctccgccatgcgtttggtgagggtagtaacgagtacgcgttcgcctttttcaatgcggtcgttgatttcgctcattaagtcgtcgacttgggtggcaacggggcggatgatgatttggggatcaaccagccctgtggggcggacgacttgttcgaccacttgtccggcgtgttcttcttcgtatttggcgggggtagcggaaacgaagatggtttgcggcatgactttttcaaattcgtggaatttgagcgggcggttgtcgcgggctgaaggcaggcggaagccgtagtcgacgaggttttgcttgcgcgatgcgtcgcctttgtacatgccgccgatttgggttacggtaacgtggctttcgtcgatgaacatgatggcgttgtcgggcaggtagtccatcagcgtaggcggcggttcgccttcttttttgccggaaaagtggcgggagtagttttcgattcctttgcagaagcccatttcgtagagcatttcgaggtcgaaacgggtgcgctgttcgatgcgttgttgttcgacggggcgttgttcgcgggcgaaaaattcgatgcgttcgcgtaattcttctttgatggactcgcaggcgcgcaagacggtgtcgcgcggggtaacgtagtggctggacgggaagacggtgtagcggccgacgcgctggataaggctgcctgaaagcgggtcgaacatatcgaggcggtcgatttcgtcatcaaacaggctgatgcgtaaggcgttttcggagctttcggcggggtacacgtcaatcacgtcgccgcgcacgcggaagctgccgcgtttgaagtccaaatcgccgcgttcgtattgcatggaaacgagcgtggcgatgatgtcgcgctgctcgatggtatcgccttctttgacggacaacaccatttgttgatactcggtcgggtcgccgataccgtaaatggcggacacggtggcgacgataatcacgtcgttgcgcgtcattaggtttttggtggcggaaaggcgcatctgctcgatgtgttcgttgatcgcgctgtctttttcgatgaacaaatcgcggctgggcacataggcttcgggctggtaatagtcgtagtaggagacgaaatattccactgcgttttcggggaaaaattcgcgcatttcggcgtaaagctgggcggcaagggttttgttgtgcgccatgatgatggcggggcggccgctttgggcgatgacgttcgccatggtgtaggttttgcccgaaccggttacgccgagcagggtttgataggcaaggccgtctgaaagcccttcgagcaggcctgcaatggcggtgggctggtcgcctgcgggcgggaagggttggtggagtttgaagggggaatttgggtattggataacttccataatcttgcctgtgatgcgtttgcggacaaagcgtgcagtagggatgggtcggaaacgtctttcagacggcataaggcggtgaaatcctgaatgtatgccgtctgaaacccaatcgctacccaagtatagtggattaacaaaaaccagtacggcgttgcctcgccttgccgtactatttgtactgtctgcggcttcgtcgccttgtcctgatttttgttaatccactataaatgccgcacggttcaaattccggtaaaaaatcgctcataacctgtcctttcaaacataatatgccgtctgaaatcctttcagacggcatcgtcaaaacctacttcttatcttttttatctttcttatctttatttgaaaccggctttttcgccgccagccccaaagacttctgccactgctcgggcgacttgactaaatccaaagctttccgcaactggtcgtctttggcagggttgggaatccgccttgaagacaaatcctcgtcctttttctttttacctttttcttttacagcgggcttatccgcatctttttcaagcggcacggcaagggtttcaccgttcacatcctcgccgcccaagggattgccgatgtgtccgaccaaatccgcctcgcggctttcaaaaatgcgttccttatcttttacttcgacatcgggaacaatcccctgcgcctgaatagaacggtcgttcggcgtataatacagtgccgttgtcagcttgaccgcgctgccgttggacaaaggaatcaaagtctgaaccgaacctttgccgaagctctgcgtaccgacgatgaccgcgcgtttatgatcctgcaatgcacctgcgacaatctccgacgcggaagccgaaccggaattgaccaataccgtcatcggtatggttttcaactcggcaggaatgcccgccaacgaatcgccgcccatcccgtacacataatcttcaggaatggctttcagtaccatgcggtctttgccgtcgcgtcccttggtgctgacgacgactgcttcagacggcagaaatgccgccgacacgccgaccgcgccagtcaaaagcccgccggggtcgtcgcgcaaatccaacaccagccccttgagcggttttcctttattttcctttaccagctcttttgcggcggtattgacgctttcgaccgtccgctcttggaactgcgacacgcggatatagccgtaatcgggttcgatcaggtgatggcggacgcttttcactttaataatggcacgggtcaggttgacgactatcggcttgtcggcatttttgcgcgacagcgtcaaagtaatcttcgtacccggcttgccccgcattttcttcaccgcttcgctgaccgtcatgccgcgtgtcgaaacattatcgattttcacaatgaaatcgccgcttttcacccccgcccgttccgcaggcgtgtcctcaatcggcgaaaccactttgacaaatccgtcttcctgcccgatttccatccccaagccgccaaattcgccgctggtggactcctttatctcggcataaccttttttatccatatattcggaatgcggatccaaaccggccaccatacccttcatcgcaccttcaaacaaatcggcatcgggtttgtcctgatagtagtttgccttgatttgaccgtaaacctccgccattgtgcggatggattgcaccggcaggacttcgttatcccgcctgtccttctcggcggcaaaaccctgcaccgccagactgacggccacgccgctgattgcacccaaagtataaagtgcgattttcttaaaaacaggtttcgacattcttctttaactttctctcttgatttccaaaaaccggaaaatacaggtacggcaaacggcaaacttcacggaacagcgcaccatatcggcacgatttgcataaagcctaccgtttcggcaatccgatcaacgtatccagctcgaagggttcaatacctgaccttgataacgtatttgcaggtaaagcccctcttccccgtccggcagcgacccgctcgagccgattttgcttcctgccgcgaccatataacccttgccgacggaaatttcgctcaaaccggcatagatgctgatgtagttctcgccgtgatcgaccacgaccactttgccgtagccgtccaactcgtccgcatagcttaccgttcccggcgcaatgctttcaaccgttgccggtgcagtggaatagaacacgcctttccaaatatcgccgccgctccggttctgcccgaaaagtccggtcggcacaccgtcaaccggttttttcaaacgtccttgcatgcggctgaaaccgtcggcactgccgatacccataaccgaaggcgcttggatgttcctgtcttcggcggtcaggttggacatttccgcacgtcgtgcttcagccttctgctgcgccgcttcttttctggctttttcggctgccgccagtctggcttcagccaattttctttttgcttccgcatcctgaatgcggtgttcggcctttttcttctccaaattgctcaagagcttgttcagctgctgctcgttccctttctgttccagcagttttcgggcatctttggcgattttggcattctgtctgcggctttccgtctgttccgccgcatcggttacaccctgttttttcagcagagattgcacgtttgcctgaattttcttcaaacgggcaagctcattgttgattttctgctcttgtaccgccaaagccttctgctgtttttccaaatccttgacaacttcccgattggaggcgtttacataacgcgtataacgcaaaaagcggtttttctgacccggttcggcgtttttcaggaacagggcaaccgcattcggctggctgtttttatagttccccgatacgaaacgggaaatctgcgctttcgtagcggcgacttccgttttcaaacggttcagctcggtattgagtttttggaacttgtcccaagcctcgcgctgtttgcggttgacggaagcaaggttgccgcgcgcctgacggatacgctcttggcggatacgctcttcctgaagctgtttgagggaattgctgacatgaagcagcattccttcgctttgtttgagcagggcttttttgttttcgacatcattggtggcagcggcaacggcggctttcaattcgtcggaatcggttttggcatttttctcttccctgtattttttgtcctgtttcactgctttgccgttcttgtcggaacggacttttttatttgcagaaacagtgtctttttccgccttgccgcccttgcgcggattgccctgtccttttgcctcttttttgccttgtttgttttcaggctgtgtttttgcgtttttttctttggatccggacacgggcttgccatgtgcctttttgtgttccgccttcgatttcttatccccttcgcgtcctttgcgcgcagactgcctggatgtcgcctccttctctgcttctttgcggtttttggcggtttttttggactctttgccctcttttgccgcctctttgccgcctgtttttttatctttcactgcgccatttttgcctttttcttttttgccttccgccgcttcgggctgttcttttttgttcttcgtctgttttttcacttcggcggaacggttgtgtgccgcgtcgtgggcggcaacggcgggcgtggaaaaaacgagcatcagggcaagcagaaggggtttgtagcgcatggttcgaccttcggaaaaagttggataatactgaaggctgcacgaaagcagccggacgtttggattatactgtcagttatgccgtctgaaaatgccgtttgcccaatcttgcgccttctttgcgcggatacttgcaatcggctcaaacagccttatattgtgcgtcatattttcaatgccgcaacggatattgtgttccgacacacagggtagcacattaagccgcataccgtatgttgcccgattttgggaacgtgcgcccctccaaacaaagcaagccctgccgctttcacggaaaacggggattcaaccgataaggaaattttgatgaacagactgctactgctgtctgccgccgtcctgctgactgcctgcggcagcggcgaaaccgataaaatcggacgggcaagtaccgttttcaacatactgggcaaaaacgaccgtatcgaagtggaaggattcgacgatcccgacgttcaaggggttgcctgttatatttcgtatgcaaaaaaaggcggcttgaaggaaatggtcaatttggaagaggacgcgtccgacgcatcggtttcgtgcgttcagacggcatcttcgatttcttttgacgaaaccgccgtgcgcaaaccgaaagaagttttcaaacacggtgcgagcttcgcgttcaagagccggcagattgtccgttattacgaccccaaacgcaaaaccttcgcctatttggtgtacagcgataaaatcatccaaggctcgccgaaaaattccttaagcgcggtttcctgtttcggcggcggcataccgcaaaccgatggggtgcaagccgatacttccggcaacctgcttgccggcgcctgcatgatttccaacccgatagaaaatctcgacaaacgctgatatgaacctctccaaccactttctcatcgccatgcccgatatggaagacgcgtttttttcacaatcggtcgtctatatctgcaaacacgatgaagacggcgcactcggcatcgccatcaacaaaccctctccgattacgatggacatgattttttccgccaccggcaaaaacatccccatgcggatgcagcacgacagcgtgatgatgggcggtccggtgcaggtcgagcgcggttatgtcgtgcataccccgatcggcaactggcaaagcagtatcggcgtttcagacaatatcgcgctaacttcttcccgagacgtgattgaaaatatttcacgcgaaggtgcggttgacaaagccttgatcagcataggctattcaagctggagcaaagggcagctcgaacgcgaacttgccgacaatgcgtggctgactgttcccgccgacgaacacatcctgttcgacatcccctacgaacaccgttacgccgccgcattcgccaaactcggcatcgacccgctcgccctgttttcaggagccggccatgcataaaattccaaaaggaacggcactggcattcgacttcggcgaagcgcgtatcggcgtggcacaaggagacgcggaattagggctatcccatcctttgagcaccgttaccggcggcagcaacgatgaaaagttcgcggcaatcgccaagctggttcaagaatggcagccgcgttattttgtcgtcggactgcccgtgcataccgacggcacgaaacatgaaatgacgcacctgtcgcgcaagttcggacgcaggctgaacggcaggttcaatctccccgtctattgggttgacgaacggctgtcgtccgtctatgccgaaagcctgctttcggaagcacaggtcttcggcaaaaaacgcaaatcggtgctcgaccaagtggcggcgcaagccatcttgcacggttttttcgagggcggtccggcggaatgtttcaacgggcgtgagggttaagcggcgcggttaacaccctaccgtgaaagaggcgcgcaccaagccgtccagctccaatgccaaattgtcccccgcaccgattgcgcccacgccggagggcgttccggtaaacaccaaatcccctttccccaaaccgtaatctgccgccagtttgtgtaaaatttcccgaatcgggtaaatcatcaaaccggtatccccgcgctgtttcaatacgccgttttgttttaatgaaaacaacaccttctcgggattgccgattctgcctgccgccgcaaaatccgacacgcacgcggaatgcctgaacccttttgccttcagccagggcagccctttttccttcagacggcattggatatcccgtgccgtaaggtccagccctacaccatatcctgcgacacatcccaaaatatctttaccctcgcccgtgccgtctgaatccttaccgaccagcagcacgagttcgcactcaaactgcacatccctactaaactcgggcagcaagattgtaccgccgctgttcaaaatgctgcctgacggcttcataaacaccacaggttcggaaggtatttcgttttttaactcttcgatatgtgcggcatagttcctgccgatacagaaaatattgccgacctcgactgcctctccttctaaaaatactgaagccacttcactttccccctaagtaaaaatgccgtctgaaattattttcagacggcattcgaccaagcttacgcatttaatgaagctgttacacgtgcaacaatttctccgattgcaactgcctgcgcttcgttgtcgcggcgttcggcgtattcgacattgccttctttcaaggcgcggtcgccgatgacgatgcggtgcggaatacccaacagctcggaatcgttcagcaacacgcctgcgcgttcgtcgcggtcgtcgaggaggacgtctgcgcctgccgccagcaattcggcatagattttgtcggcggcttcgcgtacggtgtctgattttttgtagttcatcggcacgataacgacttcaaacggcgccattgctttggtccagatgatgcctttttcgtcgttattctgctcgatggcggcggcaacgacgcgggtgatgccgatgccgtagcagcccatttccataatttgcgatttgccgttgttgtcaaggaagcttacgttcatggcttgggtgtatttgtcgcgcaattggaaaacgtgtccgacttcaatgccgcgcgccagtttcagacggccttgcccgtcggggctttcgtcgccctcgacgacgttgcgcaaatcgacaaactcaggttcggcagcgtcgcggccgaaattgaagccggtatagtggtagtcgtcttcgtttgcgccgatgacccagtccgcgcctttttcggtagcgaaatcggcatagactttgcctgcaaaaccgacagggccgagagagccgccgtttgcgccgaactgttcgacaatcgcggcagggcttgccatcgtcagcggcgatttcacgcccgcgagtttctcggctttgatgtcgttaaattcatggtcgccgcgtaacagcagcaggataagttcgccttcgttttcgccttcaaccacgatggatttcagtgttttttcaatcggaatactgaggaaatcaaccaatgaatcaatggttttgacgtttggcgtgtgtactttgacgagttctgcctgagcggctgcacgttcgcctttgagcggcaaggtcggcgctaactcgatattggcggcgtaatcggaagtgtcgctgtatgcaatcacatcttcgccgctttccgccaacacttgaaactcgtgcgaaccggtaccgccgatgctgccggtatccgcagcaacgggtcggaacgccaagcctagtcgggtaaagatgcggcaataagcatcatacatatcttgataggtcgtctggagcgaggcatagtcggcgtggaaggaataagcgtctttcatcacaaactcgcgcgcgcgcatcacgccgaagcgcgggcgcacttcgtcgcggaatttggtttggatgtggtaaaagtttttcggcagctgtttgtagctgttgatttctttgcgcacgatgtcggcgatgacttcctcgcaggtcgggcccatgcagaaatcgcggtcgtggcggtctttcaggcgcagcagttctttaccgtaaaactcccagcggccggattcctgccacagctcggcaggctgcaccaccggcatcagcaactccacgctgcccgcgcgcgccatttcctcgcgcacgacgttttcgactttgcgtaacacgcgcagccccatcggcatccaagtataaagacccgatgcgttggccttaatcaggccggcgcgaatcatcagcttgtggctggcaagcgcggcttcggcaggggcttcttttaaagtagagataaagaattggctggctttcataaaagtatttttccaaacaggcaaattcaaaagtaaatcgggtgcagattgtaacgcgaaaaaagcaggttttgcaccaacctccaaaattcaccccctgccccaagcgcgggacaaatcccataacagacggcaaaaacatgaccagaaacatcatattgaacataagcacatgatttttatagatttaaatgtgcctattttttaatcaaaataagcgtacatttgttgcgtaagacttttttaacacaagccgtggcttatcaacacggttatccacaaagcttgtgtatagattttctacaataggaaaattgccgacagagacataatgattcgatataccacaattccgaaaaaatatcgccaaaatcaaacagaatatttcgaaatcaaaaagacttgaccttaccaaacgccaacttcagtataaaacctgcttttacaggcatggttatttgccagcagacccgattgctgataggatttcgtgtggagcagatcgaacatttttttcaagttttcccttgtttccaaaacttttataattttttgaaaacattaaacttaaattatttttttcggtttgatttagaaattttcgtttttgcttattatttttcacaaacgaaaataaaggggttggctacaccctccctgccgattaaacactcaacataaaggatagatactatgtccacccaattacacgatgttgaccctatcgaaacccaagagtggctggacgcgttaagctccgtcctcgaatatgaaggcggcgaacgcgcgcaatacctcttggaaaacctggtcaaatactgccgcgacaagggcgtacgtatgccacacggcacgaccaccccgtatttgaataccgtttcggttgaaaacgaaaaaggcattccgggcgaccaaaacatcgaacaccgcatccgcgcattcgtgcgctggaacgccgccgccatcgtattgcgcgccggcaagaaagatttggaactgggtgggcacatcgcatctttccaatctgccgccaccatgtacgaagtcggtttcaaccacttttggaaagccaaaggcgaaggcgaagaaggcgatttggtcttcttccaaggtcacgtcgccccgggcatctatgcacgcgcattcgtcgagggccgtctgaccgaagaccagctgaacaacttccgccaagaagtggacggacacggtctgccttcctatccgcacccccacctcttgcccgacttttggcagttcccgaccgtatccatgggcttggggcccatcatggcgatttatcaggcgcgtttcctgaaatacttggaatcgcgtggtttggcaaaaaccaaaggccgtaaagtatggtgtttctgcggcgacggcgaaatggacgaacccgaatctcaaggtgcaatcgcactggctgcacgcgaaggcttggacaacctgattttcgtcatcaactgcaatctgcaacgcttggacggtccggtacgcggcaacggcaaaatcatccaagaattggaaggcaactttgccggcgccggctggaatgtcgtcaaagtcatttggggccgccgctgggaccgcctcttggcgaaagacaaagacggtatcctgcgccaacgtatggaagaatgtttggacggcgactaccaaacttacaaatccaaagacggcgcgtatgtgcgcgaacacttcttcaatacgcccgaactgaaagcattggttgccgatatgaccgatgagcaactctgggcattgaaccgcggcggccacgacccgcaaaaagtgtacaacgcctacgaccgcgcagcgaaccatgccgacggcaaacctaccgtcatcttggcgaaaaccattaaaggttacggtatgggcgcatccggcgaaggtcagaacgttgcccaccaagccaaaaaaatggacaaagcgtccctgaaacaattccgcgaccgctttgacattccggttaccgacgaacaaatcgaaagcggcgatctgccttacctgacttttgcccccgatacggaagaatacaaatacctgcacgcacgccgcgatgctttgggcggctacctgccgcaacgcaaaccgacgcaggaagtattggaagtgcccgagctgtcagcattcgacgcacaactcaaatccagcggtgaacgcgagttctcgaccacgatggcattcgtccgcatcctgtccactttactgaaagacaaaaaaatcggcaaacgcgtcgtacctatcgttcccgacgaaagccgtactttcggcatggaaggtatgttccgccaatacggtatttggaatccgaaaggtcagcaatatacccctcaagacaaagaccaactgatgttctataaagaatccgttgacggtcaaatcttgcaagaaggtattaacgaaccgggcgcgatggccgactggattgcggctgcaaccagctacgccaacagcaacttcgccatgattccgttctacatttactattctatgttcggtttccaacgtatcggcgacttggcttgggcggcgggcgatatgcacgcgcgcggcttcctgctgggcggtactgccggccgtacgacgctgaacggcgaaggcctgcaacacgaagacggccacagccacatccaggccgacctgattccgaactgcgtatcttatgacccgactttccaatacgaagtcgccgtcatcgtacaagacggtctgcgccgtatgtatgccaataatgaagacgtgttctactacatcaccctgatgaacgagaactacacccatccggatatgcccgaaggtgcggaacaagacatcttgaaaggtatgtacctgctgaaagccggcggcaaaggcgataagaaagttcaattgatgggctccggtaccatcctgcaagaagtcattgccggtgccgagctgctgaaagccgacttcggcgtagaagcagacatctggtcttgcccgtccttcaacctgctgcaccgcgacgctgtcgaggtagaacgcttcaaccgcctgcatccgctggaagccgaaaaagtacctttcgttacttcccaactgcaaggtcatgacggtccggttattgccgctaccgactatatccgcagctatgctgaccgtatccgcgcctacatcccgaacgactaccacgtcttgggcactgacggtttcggccgttccgacagtcgcgccaacctgcgccgcttctttgaagtggatcgctacaacgttgccgtggccgcattggccgcattggcggaacaaggcaaagtcagcaaagaaaccgttcaacaagccattgagaaatacggcatcaaagccgattcagctcctagctggaaacgctgattgatgtttcagacggcctgtttgccccattccgacatcaggccgtctgaaaaccgaatgcccgaatggtttgagcagacaaaccgtaccgatgccgcctgaagcagctttcagacggcatccaatgaaaaagattaaaggaactcaaatgagtatcgtagaaatcaaagtccccgatatcggcggtcacgaaaacgtcgacatcatcgccgtagaagttaaagcgggcgacaccatcgccgttgacgacaccctgattacactggaaaccgacaaagccacgatggatgtgcctgccgatgcggccggtgtcgtgaaagaagtaaaagtcaaagtcggcgacaaaatctccgaaggcggcgtaattctgaccgttgaaaccggtgccgccgccgccgaagccgccccggctgctgccgaagcacaacctgcacctgctgccgcacccgctgccgcaggcggtgcaaccgttcaagtagccgttcccgatatcggcggccataccgatgtggatgtaatcgccgttgaaatcaaagtgggcgacaccgttgccgaagacgacacgctgattactttggaaaccgataaagcgacaatggacgtaccttgtaccgctgccggtgtcgttaaagccgtattcttaaaagtcggcgacaaagtatccgaaggctctgccattatcgaagtagaaaccgtcggctctgccgcagcagcccctgctcaagccgctcaagctgccgcaccggctgccgctccgcctccgactgctgccgccgcacccgccgccgcgcctgcaccttctgcacctgccgctgccaaaatcgacgaggccgctttcgccaaagcacacgccggtccttccgcacgcaaactggcgcgcgaattgggcgtggatttgggccaagtcaaaggcaccggcttgaaaggccgtatcatgggcgacgacatcaaagcctttgtgaaatccgtgatgcagggcggcgcggcaaaacctgccgcagccagcgcatctttgggcggcggtctggacttactgccgtggcctaaagtggacttctccaaattcggcaatgtcgaagttaaagaattgtcccgcattaagaaaatttccggtcaaaacctgtcccgcaactgggttgtgattccccacgttaccgtacacgaagaagcggacatgaccgagctggaagaattccgcaaacagctgaacaaagaatgggaacgcgaaggcgtgaaactgtccccgttggcgttcatcatcaaagcctctgtttccgcgttgaaagcattccccgaattcaacgcctcactggacggcgacaacctggtgctgaaaaactacttcaacatcggtttcgcagccgatacgccgaacggcttggttgttcccgtcatcaaagacgtggatcaaaaaggcttgaaacaaatcagccaagaattgaccgaattgtccaaaaaagcccgtgaaggcaagctcaaaccgcaagaaatgcaaggcgcgtgctttaccatttccagcttaggcggcatcggcggcacaggcttcacgccaattgtgaacgctcccgaagtcgccatcttgggcgtgtgcaaatcccaaatcaaacctgtttggaacggcaaagagtttgccccgcgcctgatgtgcccgttgagcctgtccttcgaccaccgtgtcatcgacggtgcggccggtatgcgcttcaccgtattcttggcgaagctgttgaaagacttccgccgcattaccttataaaataaaacatccctctcaagcagtctgataatgtttggattgcttgagattgatgagtaatggtgttaaattcaacctttaaattaataacttatgggaaatttcttatatagaggcattagttgccaacaagatgagcaaaataatggacagttaaaacctaaaggtaataaagctgaagttgcaattcgttatgatggtaagtttaaatatgatggtaaagctacacatggtccaagtgtgaagaatgcagtttacgcccatcaaattgaaacaggtctatatgacggatgttatatatctacgacaacagacaaggaaattgccaagaaatttgcaacaagttccggcatcgaaaatggctatatatatgttttaaatagggatttgtttggtcaatattctatttttgaatatgaggttgaacatccagaaaacccaaatgagaaggaagtaacaatcagagctgaagattgtggctgtattcctgaagaagtgattattgctaaagagttgatagaaattaactaagttgaaaggtcaatataatggctttagttgaattgaaagtgcccgacattggcggacacgaaaatgtagatattatcgcggttgaagtaaacgtgggcgacactattgctgtggacgataccctgattactttggaaaccgataaagcgactatggacgtacctgctgaagttgcaggcgtagtcaaagaagttaaagttaaagtcggcgacaaaatctctgaaggtggtttgattgtcgtcgttgaagctgaaggcacggcagccgctcctaaagccgaagcggctgccgccccggcgcaagaagcccctaaagctgccgctcctgctccgcaagccgcgcaattcggcggttctgccgatgccgagtacgacgtggtcgtattgggtggcggtcccggcggttactccgctgcatttgccgctgccgatgaaggcttgaaagtcgccatcgtcgaacgttacaaaactttgggcggcgtttgcctgaacgtcggctgtatcccttccaaagccttgttgcacaatgccgccgttatcgacgaagtgcgccacttggctgccaacggtatcaaataccccgagccggaactcgacatcgatatgcttcgcgcctacaaagacggcgtagtttcccgcctcacgggcggtttggcaggtatggcgaaaagccgtaaagtggacgttatccaaggcgacgggcaattcttagatccgcaccacttggaagtgtcgctgactgccggcgacgcgtacgaacaggcagcccctaccggcgagaaaaaaatcgttgccttcaaaaactgtatcattgcagcaggcagccgcgtaaccaaactgcctttcattcctgaagatccgcgcatcatcgattccagcggcgcattggctctgaaagaagtaccgggcaaactgctgattatcggcggcggcattatcggcctcgagatgggtacggtttacagcacgctgggttcgcgtttggatgtggttgaaatgatggacggcctgatgcaaggcgcagaccgcgatttggtaaaagtatggcaaaaacaaaacgaataccgttttgacaacattatggtcaacaccaaaaccgttgcagttgagccgaaagaagacggcgtttacgttacctttgaaggcgcgaacgcgcctaaagagccgcaacgctacgatgccgtattggttgccgccggccgcgcgcccaacggcaaactcatcagcgcggaaaaagcaggcgttgccgtaaccgatcgcggcttcatcgaagtggacaaacaaatgcgtaccaatgtgccgcacatctacgccatcggcgacatcgtcggtcagccgatgttggcgcacaaagccgttcacgaaggccacgttgccgccgaaaactgcgccggccacaaagcctacttcgacgcgcgcgtgattccgggcgttgcctacacttcccccgaagtggcgtgggtgggcgaaaccgaactgtccgccaaagcctccggccgcaaaatcaccaaagccaacttcccgtgggcggcttccggccgtgcgattgccaacggttgcgacaacggctttaccaagctgatttttgatgccgaaaccggccgcatcatcggcggcggcattgtcggtccgaacggtggcgatatgatcggcgaagtctgccttgccatcgaaatgggctgcgacgcggcagacatcggcaaaaccatccacccgcacccgaccttgggcgaatccatcggtatggcggcggaagtggcattgggtacttgtaccgacctgcctccgcaaaagaaaaaataaatccgactgaataaacagccgataaggtttatttgagcaaatgccgtctgaaatgttcagacggcattttctattttacagcggattaaaatatcttctccgacctatagtggattaacaaaaatcaggacaaggagacgaagccgcagacagtacaaatagtacggaaccgattcacttggtgcttcagcaccttagagaatcgttctctttgagctaaggcgaggcaacgccgtactggtttaaatttaatccactataaaaacgaatccgacacggcttatctaaaggaatggttgaaaacggcagtttccaatacaacaaaatgccgcctgaacatttcagacggcatttgacccattactgctgcggctctgaaaccataccgccttcatcaaaatccggctccggttcgttttgcaacgttttaccgttcaatttcaactgattgtttttcagagaaatggcagtatcaatctggtcgccgttcaaagtcagatatttttcccttgccatactctgaaccgtactgtccaccatcaggcgcaaggtctcgttgatgtcgtcaagacttgccctgccttccgcctcatcttcggcattgacgctgaaaatattgcctgcttgactgaccgccaagtcttccagcattttttggggaatactcattctgatgtcggcttcggttttcttcagcatcaaacccaattgattcaaatcttccttcttcatgtctttaaacatgatttttccgcccacatcgatttttcccgatggcagcgtgaatcggaaagttttaatgtccaatacgggattgttggtgaacagtccggaagcctctcctttgacggcggcaatcaaatcattgcggatttgttcctcggtcatttttttggcggaaatttgtgcaaacttgcgtttcaatacggttaaggcagaagcatcgaggtgttcggcagcgatatggatgtccagcgggccgtatttttcatcgccgtacaccagtgtatcgaaacggaactgcccttcactgttgataaacgcgcctgattccccggtcttggttgaaaaagccagtttgccgacttcgattttggaaggtgcgatgctgccgttgggattgataaacgcgccaatctgcaaatcggtaacaagattgaccagttcgtttaacttgacgttgtaatcgacaccctctttccattctagggagaatttttccaaggtcagattgctgctgcccaaagcaagcggattgatgccgtctgaagtttccgaatcgaaatgcactttttcaaacgcggcatcgcctttgtctgccagcttgattttaaacaagggggcatcatagccgttccggtagcttttgaaacctttttgataaaccgtttctcccgtcaggccttcccagtgcagcctgatgcccgacagctcttcataatcgaaggcgggaacactgacttccattttaccgctgccgttaaaataaacggtattggcaagggaagccgggacttgttttccaaaaaagcgttccagaactttttccgtttcaggcgcgtatttgaactcggtttcaatgtacgcctgcgtgccgaatccgccggcgaaagggccgtgcgtgatatggttaaccagcgtaaccggctgttccaacactgttttcaggttatccggcaggtattttcgggcattattcagcaactcgggtttcagacggatgaccgtcgtttccatagaggtaaaccagccgcgctcatattggtgcgattcgacggtcaagaagcccgtttcctgcaatattttttgctgctgcgtcaagctttcttcggctttgacacccaaataataaggcgtgcccaaagcaacgccgagcaatgctgccgcaaccgaaatcaaaggttttttcatcacttcaaacaagcaggtttcaaagacgctagaatagcattatttaagcgtatcccgccatatctctttaaaagaaatgccgtctgaaacctgttcggacggcattttccggatatagggaaatcagaaatccaattccgccttcagccagtaagtgcgcggcataccgacgacggcgaagctgcggtcgtattggccgcgctgtacctgccaatagtttttgttgaacaggttttccaccgagctgctgacggtcagagtgtttttgccaagcttggttttgtagcgcgcgcctacgtcaatcaaggtataggacgggaaggcgtattgtttttgcgtgtcttggtcagacttgccgaaatacgaaacattaccgtttaaagtcaagcctttggcaaacggtgtatcccattccaaacctgctttggcaattacgcgcggattggcgacttgtacgccgttaaccagcatatcgcgtgaatttggatactctttcacggtcgattgcagatacatcagacccaaagtcggacgcaaagtattgttgagcaagttcgcgtaggtgttgaactcaataccgcgattgcgttccataccttgctcgtcgccggccgcgccgccttgcgccttatagcgggcgaaatcagaattattgccataggtcagcgttgttgttaccccttttgttgtcttggtagttgtatgaccgcgccagtagcccgggcgtttgatttggaacgcgtttaacgtggttacgaaattgccccagtttttacgcacgcccacttcaaactggcggctgacacgcggtttcgccattgtcgtttcgccggaatcatcggttttgatgtcggcaggctccaagtcttccatatagttgccgtacacaaccaaatcaggttgcggcacccacgccgccatcagcatcgggctgaaacgtttggcatcgccgctctgtgattttttgtcggtatattcgactgtttggaaacgtccgcccaaagtcaggcggtatttgttatccacgaagcccaaggtgtcggacaaagccaggctgttgactttgatattggcatccaagttggcagagttctcccaagaattgggatagtcggctgtaaacgatgccaattgatgctcaatatttccgtttgccttcacttctaccttgctagctccggctgccgttccgcgtgattttttcttattggtgtattcaaccgcttggaaacgtccgcccaaagtcaggacaagcgtccgccggcgttttgaatgtcctgcatacgcgcgcgaccgccgttggttttgcgttttgcgtagatggaatcgaacgctacgcgcagtgtttcgccgcgatagtcggcatttaccgcaaattctttgttgtcttcgctgtaaccgtggcgcggggtgtcgccgtggcgcagtttgccgttggcgcgcacgccgaatgctttgttttcgccgaaacgttggcccaagtcgaacgtaccttgggcgcggttgttgccgaaccgggccaaaccgattttgcggttgccttcatcagcggcttttttggtttcgatattgacggaaccggataccgcgccatcagggttcatgccgtttacggcggtggacgcgccttgaatcagttgtgcggagccgacttgcacgctggtcgtgccttgcgtgccgtacatacctgtcaaaccgttgacgctgaattggcgcgcatcaagctgataacctctgaaatacaatccggtcagcgtgttgctttcgccgccgaactgccaaacggaagcgtcttttttcgctacggcatccaccaaagtacgcgcctcggtgttgttgagggcttgttcgtcgtagttgacgacggtaatcggcgcggtaaaggcgttggctttgcccattcacttggtgcttcagcaccttagagaatcgttctctttgagctaaggcgaggcaacaccgtactggtttttgttaatccactataaacaaatcgtacagggttctccgtttaatcagatatgggtttccatcttcggcagtttcgggcatttagccgtttccaccttcctgcccccgctgccagtaaaaatgccgtctgaaatatcggcgcgatacttcagacggcatacccgcccgttttcccgcattcccgggagcgggctgaaatttaaacgtgtgcggaaatgattttcaacatttgcgccagcactttgggattggcagccacaatatcgccgctttccagccagccgtcttcacccgacatatcggttacgataccgcccgcttcctgaacaatcaatgcaccggcggcaatgtcccacggtttgaggttaaactcgaaaaagccgtcaaaacgtcctgttgctacggcgcacaaatccaaagaagccgcaccttcacgacggccgccggcggtttttgccaagaaatctttcaaaatcgccagatacttgtccatcatgctttgatcgacaacagggaagccggtaccaatcaggcagcggttcagttcgatgcggttggaaacgcggatgcggcggtcgttgagcaacgcgcctttgccacgcgaagccatatatacgtcgttgcgttcgggggcgtaaaccaaagcttcttgcaacacgcctttgtgcagcagcgccatagagatggcgtattggggatgaccgtgaaggaaattggtcgtgccgtcgagcggatcgataatccattcgtactcggctgcggctttgccgtgggagccgctttcttcacaagtgattttgtggtgcggataggcttctttcaaagcctcaaccaggatgatttcggaattgcggtcaacatcggaaacaaaatcgttgaaggctttgctgtcggttttgacggcatcgagattgcccgcggcgcgtatcatcatctgaccggcacggcgggcggctttaaaggctgtattcaaaaacggattcatcagatttccttaagggtggcataccgccggttcggacgtacagtccttcggagcggcaaaatcggagtttatttggttggggtaaatcctgccaaatcgggtaaaataccgcctgacgcgtgtctgcttcaggcgcaacgttaaatttccgacgttgttaaagaacatttcagacggcatttgaccgtccgaacgaaaaagacggcgcattataccctattccattccgaccgaaaaccgaacatgactactctcaaacccgccctgcccgcttatctggacaacatccgcatcatcctcacgcgcaccagccatcccgccaacatcggctctgccgcgcgcgcgatgaaaacaatgggtctgcacaaactgaccatcgtcgccccaaatctgatggcaacgccgatgacggaaaacccgcccgtgtttgacccggagcatcctcaatcgtttaaattaccggaagaaagcttcatcctcgcttccggcgcggcagacgttttggaaaatgccaccattgccgcttctttggacgaagcccttgccgacaccaccatcgcctgcgccctgaccagccgccgccgcgaaattactgcgccgctgcaaaccccgcgcgatttggtatccgaattactgcagaccgcaaaccgaggcgagaaagtggcactggttttcggcaacgagactttcggcttgagcatcgaagaagtccaagcctgcaaccgactgatgaccatcaacggcaatcccgactatttctcgctcaacctcgcccaagccgtgcaggtcgtgtgctacgaaatcttcagccaaaccggttcgcccatgacccatcttcaacaagaagaccacgctgcgacccacgagcaaatcaaaggcatggtcgcccacatggaaagcgtgatgaacgacatcggctttttcaaccgccgcaacggcgagcgtctgatgcgccgtatgcagagcctgttcggccgcgccaatacgcaaaccgaagacatcgatatcctgcgcggttttttcaataccgtcagccaccgtatccataaaaaagactgattaaggccgtctgaaaacatttccagcttttcagacggcatgactgatattcggataagcatgaattacgccctagacgcattatggtggaaacttaccagccaacccgtccgcgaccttgcctcgctgctgactgcgccgcctttgtggcaaagcggctgcgaattgagcgtgcgagaactactgggagaacacggtttccgttaccttttggcattggatgccgatcccacgcggctgacggattacctcgcccaacgcgccccgttcggccaccgtctcggcatttatgccgaagagctgctggctttttggtttgccaatgcaccgcacgccgaactgctcgcgcacaacctcacggtttccggttcggacggcaatacgcaaggcgcggcggattttgtggcaaggcttaacggcaaaccctaccatatcgagctgacctgcaaatattacggcggcgacacggacagtcccgaagggatgcgcggattcgaccccaaagacacgctgttgggaaaagccgccaaactgaccgcccaactcggtctgccgcacacttcagacggcatccggaccttgcggcagcacggtttgccgcttaacgtaaaacccgtttccatcgtgcgcggcatcggattttttccacacggtttccatgcttttgagccaccgcttaatccatacggttggcgcggcatctatattcaagattgggcggaatacgggtttaaacgccaagaagtccgctaccatctgctcgaccgtatggcctacctcgcgcctgcgcgtgtcgccgaaaccgaaacattgaacgcaaccgaaatccgccgtatcgaccaaggcttgattgccgttttggaatgtcggccggacggcttttggcacgaaatcgaacgcattatgaaggccgtctgaaaccctttcccaacattaacgcgtatatctattgagaggcttagtgatggaaatctcatttcccatacaatttatgaaagagtcatccgagttaataaggatattggatatgataaatataacaacaacatgccaactaatattatgacgatccaaacaaataagtatggtaatttaataactacgaccccaggtagaatacaatgaagaataatgttaaaaattggacaactaaagaagtcaagcaatcattagataaatttaataatattttaattaaaaatacttttcttcttcagtatctgaaaaaagagttttcagcttcaagtgcttattgtttgtctatgctccctgaagaagaagatatatatgaaatattggttaatgggaatattattattgatttagaatttaataaacatacaaatgaaacagttgttattaatgttactgatgttgatgaatacttgaaaactttaaccaatgagagtggtagagtattttttacattagcaaaagaaatcggcaaacagaaaaacatttaacaagagcgaaatacaaattaaaaactcaatggagtgatggcatatttaggatagatatactgaacgaagaaaataaattttgtttttttcctcatgttttagggagtgattacaaaatgaaatcgctgatgtgattatatcggatgctgttcaagcgacctgaaaatagaacttttttcaggctgcctttgtagttaacggagaaatttagacaaatcccgattgcgcacttttaacacatctttcttattgcggatagaatactaagtaatgataaagatgctattgttattttaaggacgttagattgattatgaataacccacagtaagagaacccattacattatgaacgccgcacaactcgaccataccgccaaagttttggctgaaatgctgactttcaaacagcctgccgatgccgtcctctccgcctatttccgcgaacacaaaaagctcggcagtcaagatcgccacgaaatcgccgaaaccgcctttgccgcgctgcgccactatcaaaaaatcagtaccgccctacgccgtccgcacgcgcagccgcgcaaagccgctctcgccgcactggttctcggcagaagcaccaacatcagccaaatcaaagacctgcttgatgaagaagaaacagcgttcctcggcaatttgaaagcccgtaaaaccgagttttcagacagcctgaataccgccgcagaattgccgcaatggctggtggaacaactgaaacagcattggcgcgaagaagaaatcctcgctttcggccgcagcatcaaccagcctgccccgctcgacatccgcgtcaacactttgaaaggcaaacgcgataaagtgctgccgctgttgcaagccgaaagtgccgatgcagaggcaacgccttattcgccttggggcatccgcctgaaaaacaaaatcgcgcttaacaaacacgaactgtttttagacggcacactggaagtccaagacgaaggcagccagctgcttgccttattggtgggcgcaaaacgaggcgaaatcattgtcgatttctgtgccggtgccggcggtaaaaccttggctgtcggtgcgcaaatggcgaacaaaggcagaatctacgccttcgatatcgccgaaaaacgccttgccaacctcaaaccgcgtatgacccgcgccggactgaccaatatccaccccgaacgcatcggcagcgaacacgatgcccgtatcgcccgactggcaggcaaagccgaccgtgtgttggtggacgcgccctgctccggtttgggcactttacgccgcaatcccgacctcaaataccgccaatccgccgaaaccgtcgccaaccttttggaacagcaacacagcatcctcgatgccgcctccaaactggtaaaaccgcaaggacgtttggtgtacgccacttgcagcatcctgcccgaagaaaacgagctgcaagtcgaacgtttcctgtccgaacatcccgaatttgaacccgtcaactgcgccgaactgcttgccggtttgaaaatcgatttggataccggcaaatacctgcgcctcaactccgcccgacaccaaaccgacggcttcttcgccgccgtattgcaacgcaaataaaccggtttgaacaaaatgccgtctgaacccttttcaaagcgttcagacggcatttcatcaattatagtggattaacaaaaatcagtacggcgttgcctcgccttagctcaaagagaacgattctctaaggtgctgaagcaccaagtgaatcggttccgtactgtttgtactgtctgcggcttcgtcgccttgtcctgatttttgttaatccactatatttttgggaatctgttttaccccaatatataaagcaccatattaaggcggagtgtcttccccactttgacccgaacccggaaaagacaccgcccaagccaatcctgatgctgccccgacagccaaccattaaggaaatcctaatgaactttgctttatccgtcattatgttgaccctcgcctctttcctgcccgtcccgcctgccggagccgccgtctttacttggaaggacggcggcggcaacagctattcggatgtaccgaaacagcttcatcccgaccaaagccaaatcttaaacctgcggacgcgccaaaccaaaccggcggtcaaacccgcccaagccgacgcagggaagcgcacagacggcgcggcacaggaaaacaatcccgacactgccgagaaaaaccggcagcttgaggaagaaaagaaaagaattgccgaaaccgaacggcagaacaaagaagaaaactgccggatttcaaaaatgaacctgaaggcggtgggaaattcaaatgcaaaaaacaaggatgatttgattcggaaatacaataacgccgtaaacaaatactgccgttaatcggctctagcgcaaacccgatgccgtctgaagcggcacggggtttgtcatttctgccagtaggttttgacgttgacgaactcgtacagcccgaattcggacaattcgcgcccgtaaccggaatctttgactccgccgaaaggcaggcgcaaatcgctgctggtatggcggttgataaacaccgatcccgcctgtattttttcggcaaaccgccaagcgcgttcggtatcggcggtataaatgcaggcaccgagcccgaacggggaatcattggcaagggcgatggcatgttcttcgttttcggcgcgcaaaatcagggcggccggcccgaatacttcttctctccagacgcggcaggcaggatttaccctgtctaaaaccgtcgcgggataaaaccagcctcgcccttgtgggatttttccgccggtcaggcataccgcgccgtttgaaacggcatcttcaacctgcccgtgaaccctgtcccgcaaatcttcgcggtgcagcggtgcaagcgtagtatcgggatgtttggggtcgcccattttcaatttagcgcattcggcaagaaacagcgtgataaaacgatcggctgcggcttcggttacgatgatgcgcttggcggcgttacacgattgccccgcatcgcggaaacgggaataacaggcttctgcggcggcacgctccaaatcagcatcgggcatcacgataaaggcgttgctaccgccgagctccaacacggttttcttaaggtttgcgcccgcgtgtgccgcaaggatgcgccccgtatgcgttgaaccggtaaacgccattgcatcggtatcttcaaccgccttgagcgtgcccgcctcatccagccacacgcctgccagaggaatgccgtctgaagccaaatcgaacagtgcctgactgacgcgtgccacgctgggcgcgggtttgacggcgcacgcgttgcccgcgcacatagcgggaacggcgaaacgcaatacctgccagacgggatagttccaaggcatgacggcaaacaccacgcccaaaggctcgaagcgcacctgactcaaactcgcctgcgtcgcgatggttttgtgggcaagcagttcgggggcaaggcgggcgtaatagcgtatcagttcgatagacttgccgatttccgcacggcattcgtgcaagcagcgtccgacttcctcacacaccatttccgcaaaacgctctttctccgcctccaaacggtcggcaaatttttgcaggcgcgcggcacgttcggttacgcccagttgcgcgaacgccccgccgcgcattttcaaatccgccagccgccgttcaaactccgcataatcttgagcggggcggcggtaaagcgtttcgcccgtaaatacattgacactgtgaaacatcgaatcaacctgccagttgcgggaatatcgttttcagtcccgacacaataatctccaccgataccgccgccagcatcatacccataatgcggtttaaaatcgtcagccccgtcgcgcccagcaggcggctgaccttcccggcaacgattaaaatggcataacaaatcgcactgaccaccaaaccggccgcgataatcaacgcgatgtcgccgtatgttttagccgccgaagcgtaaataatcacggtcgaaataccgcccgggccgatggtgatcggtatggcgatgggcacgacggcaatcgctccggcattgcgggcggggcgcgcctgccccgtttccggctgcgcgccgagattctgcttggcgggattgtcgttgccgttcatcatcgaaatggcgatcagcagcaccaaaatcccgccgccgacctgaaacgaaccgacgctgatgcccaaaaccttcagcagcgtaccgccgatcagcgcaaataccgcaatcacggcaaacacggcaacggcggccgtccgcgcgaccttcctgcgctccttcgtgctgtgcccgttggtcaggtcaaggtaaagcgacaacgcgctaaacggattaatcagcaccaaaaaagccacaatcagcttgccgatttccatgcccaatcccattatttccccctccttcaaacccgtgcggcaggcatccgatgctgcaaattgccgccgcaacggatttttccgttataattaaaaattcaagcaatacgccccatcatacccgaacgacggtatctttaccatcagacaaggatgcttttcatggcactgacacttgccgacgtagacaaaatcgcccgactctcccgactgcacctgactgcggaagaaaaagaaaaatcgcttcaagaattaaacgacattttcactatggtcgaacagatgcaaaccattaacacagacggcatcgaaccgatggcgcacccgcacgaggccgccctgcgcctgcgcgaagacgaagtaaccgaaaccgaccgcgccgccgaatatcaggcgggtgctccggaagtacgcaaccgtctgtacatcgtaccgcaagttatcgaagaataatccgaatatgcttcagacggcatcagcaataccgcccgaagccctttaaggatggaagatttatgacccaatacacattgaaacaggcaagcgtcctgttgcagtccaaacagatttccgccgtcgaactggcaagcgcataccttgccgccatcgccgaaaaaaatcccgccctcaacggctatatcaccatcgaccaagataaaacccttgcagaagcccgtgccgccgacgaacgtatcgcgcagggcaacgcctccgcgcttaccggcgtacccgtcgcctacaaggatattttctgccaaaccggctggcgcagcgcgtgcgcttccaaaatgctcgacaacttcatctccccctacaccgccaccgtcgtccaaaacctgctcgacgaaggtatggtaacgctcggccgcaccaatatggatgagttcgctatgggttcgaccaatgaaaactcattctacggtgcagccaaaaacccatggaatcttgagcacgtccccggcggttcgtcaggcggttccgccgccgtcgttgccgcgcgcctcgcccctgccgcgctcggttcggacaccggcggctctatccgccaacccgcatcgcactgcggcattaccggcatcaaacccacatacggcacggtttcccgcttcggtatggtcgcctacgcctccagcttcgatcaaaccggcccgatggcgcaaactgccgaagactgcgcgattctgttaaacgcgatggcaggtttcgaccccaaagactccaccagcctcgagcgcgaaaaagaagactacacccgcgatttgaaccaaccgctcaaaggtttgaaaatcggcctgcccaaagaatatttcggcgaaggcaacagcgccgatgttctgacggcattgcaaaacaccattgatttgctgaaagcccaaggcgcggaattgattgaagtttccctgccgcaaaccaagctgtccatccccgcctactacgtcctcgcctccgcagaagccagcaccaacctttcacgttacgacggcgtacgttacggacaccgtgccgcccaattcgccgatttggaagaaatgtacggcaaaacccgcgccgaaggtttcggcagcgaagtcaaacgccgcatcatgatcggcacttatgtactgtcgcacggctactacgatgcctactatctcaaagcccaaaaactgcgccgcctcgttgccgatgattttcagacggcatttgcacggtgcgacctcatcctcgcgccgaccgcacccactgcagccccaaaaatcggagcggatgcttcgccggttgaaacctacttgagcgatatctacaccatcgccgtcaacctcgccggactgcccgcattgaccctgcccgcaggcttcagcggcggcggactgcccgtcggcgttcagcttgtcggcaactacttcgccgaagccaaaatcctcggtgcggcgcatcaaatccaactcaacagcgattggcacggcaaacgacccgaatgaagcagaaccgcacctttaccttccccgattttcgcaccgtttacagctatgcgcctttatatcggctgcaacatttaaaatacacattgcgaaaatttttcggaaaaaaagaaatttacgccttcgagcagtttgtcaacgcatcccctatccgtcaggggctgttcctccactgcccgcaaaatgcctatccgctgctgcgcgaatttgttgacaggcgttttaactgcaaacgccgtttagatgcgatgacggcagattttctcatggcggaaaaactgttcggcacagacatcctgcaccaaatggaagactaccgcttccatttggtcttggcgcacctttcagacggcatcagcttgtggctcaaccgcaacgacaactgcgtcgaagaaggcgcgtggtctttatctttgcgcgacgaagcaggcaaccggctgtatatggcgactttcgcctttgtcggcacacacctgctgacagcctccgtacaagggccggcgggtgaagaagccaaagacaccgtccgccgcataaccaaacaactccacggcttgcgtccccaacaactgatggtaaccgccctgcaatatttcgccgccgtactcggcttggacggcgcaatgggcattgcacaaaaacatcaggtcaaactgcgctggaaacttaaaaagcgcgtcaaaatgaattacgacgcattctggcaggaatacggcgcaagtttggaacgggacggctactggcatctcccccaaacccccgcccgcaaagaccttgccgacatcgaaagcaaaaagcgttcgatgtaccgcaagcgttatgaaatgctggacaatatggttgcagagatgaaagacagtctgaaaacagaagcacgcggcatttcagacggcatccaaacggaaaaaccgccccgccggacagcctgacgcgaagactatcgaattgatattttagagaaagaagctcttatgacctgggaaaccgtaatcggcttggaaatccacgtccaattgaacaccaaatccaaaatcttcagcggcgcatcgaccgcattcggcgcagaacccaacgcgcacgccagcgtagtggaatgcgcgctgccgggcgttttgcctgtgatgaaccgtgaagtcgttgaaaaagccatcaaattgggtttggctttagatgcgaaaatcaatcagaaaaacgtgttcgaccgcaaaaactacttctatcccgacttaccaaaaggttatcaaatcagccagttggacttaccgattgtcgaacacggcaaattggaaatcgtagtcggcgacgatgtgaaaaccatcaacgtaacccgtgcgcacatggaagaagacgcaggcaagtccgtgcatgaaggcttgaacggcgcaaccggtatcgacctgaaccgcgccggcacgccgctgttggaagtggtatccgaacctgaaatgcgttccgccgccgaagccgttgcctacgccaaggccttgcacagcttggtaacctggctggacatttgcgacggcaatatggcggaaggctcgttccgcgtcgatgccaacgtatccgtgcgcccgaaaggtcaagaagagttcggcacgcgccgcgagattaaaaacctcaattccttccgtttcttggagcaggcgattaattacgaagcggaagcgcaaatcgagattttggaagacggcggcaaagtacagcaggcaaccatgctgtttgatcccgaaaaaggcgaaacccgcgtaatgcgcctgaaagaagatgcgcacgactaccgctacttccccgaccctgatttgctgcccgttatcatttcagacgcccaaatgcaaaaagccaaagcagaaatgcccgagctgccgaaagaaatggcagcgcgtttcgtggcggattacggcgtgtccgaatacgacgcgcgcctgctgaccgcaagccgtgcgcaggctgcctattttgaagaagccgccaaagaaagcggacaaggcaagctgactgccaactggatgaacggcgaacttgccgccgcgctgaacaaagaaggcatggaacttgccgacagcccgattaccgccccgcgcctcgccgcgctggttggcaaaatcgccgacggcacattaagcagcaagttagcgaaaaaagcctttgaagccatgtgggcagaacccgaagccaccattgccgaaatcattgaaaaacacggtttgcaacagatgaccgacaccggcgagattgaagccatggtggacgaagtgctggcaaacaacgccaaagccgtggaacagtttaaatccggcaacgaaaaagccctgaatgcgattgtgggacaagtgatgaaggccagcaaaggcaaagccaaccccgcgcaggttcaagagctgattaaagccaaactggcttaatccgttatcacacaggtcgtctgaaagcaaagttccaacgaaggtaaaacaggaaataagctttcagacggccttttatagtggattaaatttaaaccagtacggcgttgcctcgccttgccgtactatttgtactgtctgcggcttcgtcgccttgtcctgatttaaatttaatccactataacttaatctgctcaaaccataccaagacatgaaccacaccgttaccctgcccgaccaaaccacctttgccgccaacgacggcgaaaccgttttgaccgctgccgcccgtcaaaacctcaacctgccccattcctgcaaaagcggtgtctgcggacaatgcaaagccgaactggtcagcggcgatattcaaatgggcggacactcggaacaggctttatccgaagcagaaaaagcgcaaggcaagattttgatgtgctgcaccactgcgcaaagcgatatcaacatcaacatccccggctacaaagccgatgccctacccgtccgcaccctgcccgcacgcatcgaaagtattattttcaaacacgatgtcgccctcctgaaacttgccctgcccaaagccccgccgtttgccttctacgccgggcaatacattgatttactgctgccgggcaacgtcagccgcagctactccatcgccaatttacccgaccaagaaggcattttggaactgcacatccgcaggcacgaaaacggtgtctgctcggaaatgattttcggcagcgaacccaaagtcaaagaaaaaggcatcgtccgcgttaaaggcccgctcggttcgtttaccttgcaggaagacagcggcaaacccgtcatcctgctggcaaccggcacaggctacgcccccatccgcagcatcctgctcgaccttatccgccaaggcagcaaccgcgccgtccatttctactggggcgcgcgtcatcaggatgatttgtatgccctcgaagaagcacaagggttggcatgccgtctgaaaaacgcctgcttcacccccgtattgtcccgccccggagagggctggcagggaagaaatggtcacgtacaagacatcgcggcacaagaccaccccgacctgtcggaatacgaagtatttgcctgcggttctccggccatgaccgaacaaacaaagaatctgtttgtgcaacagcataagctgccggaaaacttgtttttctccgacgcattcacgccgtccgcatcataattccccggtataaagaggattcgagctttccgttcagaacacaaaaaacttcccgtccgtgttttccccgtgaaaaaatgccgtctgaaacccgattccggttttcagacggcatatgttttttcctgttcaaggcgacagccgctcgcgtatccagccaccatccagcaaacggtattggatgcggtcgtgcagcctgctcggtctgccctgccagaactcaagcaaatcgggaatcacaatatagccgccccaatgcggcggacgcggcacatgcagaggatgtttgagtccaaccgccgccgcctttgccaccaataccgccttgttcggaataacctcgctctgcgcacttgcccacgcacccaaacggctctgatacgggcgactctcaaaatattcgtccgacaacttctccgccagcctttcaacacgcccttccacgcgcacctgacgctccagctccggccaaaaaaacgtcatcgccgcaaatggatgagcatccagcgaacgccccttgcggctgtgataattcgtaaagaaaacaaaaccttcagaattaacttccttcagcagcaccatacggctgttgggcctgccgcgtccgtcaaccgccgccacattgaccgccgtcggctcgttgacctgtgcgcgtaccgcctcgtccaaccaccgctcgaactgctcgatcggattatcggcgcaatcggcttccgacaattcccgtttgctgtaatcttcccgaatattgtgcaaatccatttactgctcctcttatcatttgaaagattctactcccgcacgcaaaccgatttcaaccgtcgcacaaactttgccccgaccccaagccgcagcgacgatttcatccgcaaaaccgccgcatcaggtacaatatcgaaccgtccgaccgaggacggcattttatcaacccgtcctgccgcacacgccgcagaagaaccgccttatcaggcgagttaggaaaaatgatgtccaaacagcccaccagcaaacgccaatggcgcgacggcgcagccccgtctgccaagaaaaccgccaaaccgttcaaaagcaaagcccgtcccaaagatgaaacgggcaaaaccgcttcccaaccttacggacaaaaagcttcagacggcatcaaacctcaaaacgtccccaaacagcgcgccgccaaagccaaaaaactcgtcgtccgcaatcccaaccaaaaaattatggaacacgcgcgcgatttgaaagaacgccgcagcgacctgtcgcgcatggaacccgaacgcctgcaaaaagtgcttgccgcgtccggcgtcggctcgcgccgcgaaatggaagaatggattaccaacggctggataacggtcaacggcaaaaccgcgcaactgggcgacaaagttacccccgacgaccacgttaccgtcaaaggcagcatcatcaagctcaaatgggcggaccgcctgccgcgcatcatcctgtattacaaacaagaaggcgaaatcgtttcccgtgacgacccgcaaggccgcgtcagcatattcgaccgcctgccgcaggccgccagcagccgctgggtcgccatcggacgcttggacatcaacaccagcggacttctgattcttaccacctccggcgaactcgtccaacgtttcgcccaccccagcttcgaagtcgaacgcgaatacgccgtgcgcgtcttgggcgggctgaccggcgaacaaatgcgcgtcctcaccgaagaaggcgtgatgctcgaagacggcttggcaaaagtcgaacgcatccgcgaacaaggcggcgaaggcgcgaacaaatggtacaacgtcgtgattaaagaaggccgcaaccgcgaagtgcgccgcatttttgaaagccaaggactcaccgtcagccgcctcgtgcgcatcggcttcggtcccatcggactgcccaaccgcctcaaacgcgggcagttctacgaactcaaccccgccgaagtcgccaacatcatcaaatgggcggacatgctgctgccgggcgaacgccgccgcaaaaaagcctaaacccgccaaaacacaaaaatgccgtctgaaacatctgctgtttcagacggcattttattcgggcgttttcaggagaaaaggtcgagtgctttgacaaagaccatcaccacgccgtaggcgagcggtatgacggccaatgcccaacgccaccagaccgatatgccgccgccggaaactttttcgcccacaaggtaagcgtcggatatggcggtttcgtcatcggggttgccgctgtgtgcggcggttttgatgtctttttcgtggtgtttttcgtgtacggatttgacggcgaggttgcacaacaaaccgataatcagcaggcacgccatgatgtacatggttacgctgtatgcctgtgccgccggtatgccgctgtcgatttggctttggcgtatgtaattgaccagtaccgggccgatgacggcggcggttgaccaggccagcaggatgcgtccgtgaatcgcgccgacctgataggtgccgaacaggtctttcaggtaggcgggaatggcggcaaatccgccgccgtacatggaaataatcacgcaaaagccgatgatgaacagggctttgctgccgccctcgccgatggagggaacggcgaaatacagcagcgaaccgagtacgaagaagatggtgtaggtgtttttgcgtccgattttgtcggaaacgctcgaccacaaaaagcgtccgcccatgttaaacaggctcaggaggctgacgaagcctgccgccgcacctgcgccgactgctgcctgcctgcctatggaggtttcggaaaagagttcctgaatcatcacggatgcctgacccaatacgccgatgccggcagttacgttcaggcacaatacccagaacaacagccaaaactgcggcgttttcatggcttgggacacgttgacatgattgctgctgaccagcttgttttgcgttttcggcgcggtatagccttcaggtttccagccgtcggcaggtacgcggatggtaaacgcgccgaacatcatcagtgcgaggtaaagcagacccaatacggcgaaggtttcggcaaccccgaccgaagcagcgtttgaaaaggtgttcatcagtgatacggaaagcggcgaggccagcattgcgccgccaccgaaacccataatcgccaaaccggtcgccatacccggcttgtcgggaaaccatttcatcagtgtggaaaccggcccgatgtagcccaaacccaagcctacgccgccgatgacgccgttgcccaaatagagcaggaagaggttgtgcgtacgcacgccgaatgcggatacgaagaagcccaggctgaagcagcaggcggcggcaaatatggctttgcgcggccctacccgttccatccacgtaccgaacagggcggccgacgcgcccagcatcgcgagtgcgatactgaaaatccaacctacggtcgtcagcttccaatctccggccgccgattcggttatgccgataagtttggtcagcggcgcgttgaatacggaataggcgtaaatctgcccgatggcaaggtgtaccgccaatgctgcgggcggtacgagccaacggttgaaacccggcttggcaatgcttgcctcacggtctaaaaacttcataacatcctctttctgtcagttgaaaaataaaatttcatttgcccaatggaaacttattgaaaattataaaaaaatatcgggtcgggtttttatccgccccaagatgcgccgtctgaaacatttcgggtgtacggaaaggtttctgttttttccgacaaattcctgcggcttttcgcttccggattcccgctttttcaggaatgacgaattaaagattatcttaaggtcaagggactggattcccgctttcgcgggaatgacggcggcgggggagcggtttttccgattgggtttaaatgcaatcgaacaaatcctgctgcccttgttctttgcttacgcgcacgtcggtttcgccgtcggcgaagataatgtgcagcttctgcccctgcttcaaaacatcggcgttgcggatgacttgtccgcgtgtgtttttgacgacggaaaagccgcgctccagaatgtgctgcggcgaaacggcttcgagcaatgcggcttgggcagtcaggctttggcggcggtgggtaagcagttggtggaaggcgtgcgacagggccgtctgaaagcggtcgatgttttttttgcaaacggaaacatcaggacggcaatgtttcagggcttgggtttggcgttcgaaacgggcggtgtgggtacggacgttttgcgtcatcgagtaagacagcgtttgcgccagcttgccgattgaagcgcgctgttcgtcgagtttttggcgcggatgacggatttgccgcgccagccagtcgagtttttggctggcatcgaaatagcgttgttccaaaacggttttcagacggcattgggcttgggcgaggcggtgcagcgattcttggcggttggggctgaccagttccgccgcaccggtcggcgtgggcgcgcgcatatcggcgacgaaatcggcgagcgtgaaatcggtttcgtggcctacgccgctgacgaccggaaccgtgcaggattcgatggcgcgcacgaccggttcttcgttaaacgcccacaagtcttcaatgctgccgccgccgcgacagacaatcaacacatcgcattcggcgcgttgcgaggcggttttaatcgcttgggcaatttgcaattcgctgcctgcgccttgaacgggtgtcggataaacgataacggggatttcgggtgcgcggcgtttcaaggtagtaacgacatcgcgcaaagccgccgccgccagactggttacgatgccgatacattgcggacggacgggcaaaggtttcttgcgttccgccgcaaacgcgccttccgcctgcaactgcgccttcaaccgctcataggcttcgtaaagctgccccaaacctttgagccgtacttcgtttacggtaatctgaaattcgccccgcgcttcataaatactgatttttcctgatacctcgatatggtcgccttctttcaaaggcttcgccaaacgcaccgccgcacccttgaacatcgcgcaacgcacctgtgcgcggctgtctttgagcgagaaataataatgcccgctggcggcacgggtcaggttggatacttcgccggcaatccacaaaccggcaaggtggttttccaaaagacttttggcaaatgcgttcaactcggaaacggacaacacgtcagaatgaaaaaaatcagacatcgaatcaatcaaatagtaaaaaatatgaatatgttttgaagcctaaggcggcaccgggccgcctaaattgtcaacaatattataacacgcgccatcttgccgcccgccttttcccgtatgacttttttaagcggggaatgggaaaaatattcatcaacctgcctgcaatctattcaaattgcaccgccggcaggctatgatgcggatattttcgacaggaggaaaaatggatacgcaggcagttatcacacatatcgcccgatggttggacgaatacgccgcccgggcaaatgcaaaagggtttgtcgtgggcgtttccggcggcatcgattccgccgtcgtctccgcactcgccgcccgcaccggccgccccacgctgcttctggatatgccgatacgccaacaccccggccagcttgagcgggcaaggctgcacatccgcaatctgcaacggcaatatgccaatgtaagcgcgcaaacggtcgatctgaccgacaccttccagacctttgaacaaaccgtcggtgctcatcagacggcatttgacagtcagccgctttccctcgccaacgccagaagccgcctacgtatgctgaccctgtactactacgggcagatacacggactgctggttacggggacaggtaataagattgaagatttcggcgtgggcttttttactaaatacggcgacggcggcgtggacatcagcccgattgccgacctgaccaaaacgcaggtttaccggcttgccgaagcattgggcgtggacgaggcgattcaaaaagccccgccgaccgacggcctgtgggatacggaacgcaccgacgaagaacagatgggcgcaagctatcccgaactggagtgggcaatgggcgtgtacggcacgcgcaaacccgaagattttgaagggcggcagcgcgaagttctagaaatctatacgcgacttcaccgcgccatgcagcacaaaatcaacccgattcccgtatgccgcattccgcccgaattgctgggctgaaacacggaaatgccgtctgaaacggaaaaccgtatttcagacggcatggaaatatccgactcctatcccttaagaatcgagtacgcgggcaaacaaaatatcgttttccaaatgaatgtggtcgttcaaatcctccaccatttctttcgccagcgcgtaaagccgcgtccagcttccgcaagccccttctggcggttggaaattgtcggtcagctctttgagccgtgcgatggcgcggtcgtgttcttcgtgttcgtgcatcatcacgccgatgggcatcgccgcaccgcgtccgacaccctgattaatcatcggaaacagcatcctttcctctttcatcatatgcatcagcagttcgttctgcatataggcaagcagctcggcaatttccgccggaaaggtgtcggcatgaacttgggccactttttgcgccagcggcaccaattcttcaaattgtgcacggtggacattgtggtagcgttgcaggatatgatcgacggttgcaccaaagggggcggtctcccaaacggaaaaatcagtcatcgcagtgttccttttacagggtttcgggtttggttttgaacattcatactttaagaatcaattcaaacggagcatacaccgcccgcgcgcttctgtacagcctcaaacgtattccttacattttgataataaaagtaattttcagaaataaaatactgtccgaaccgttttttagaatttgcaaaggcgattggggcggtacagaaaaactattatcccgcccgcccacttgaaatttttatgcccaagccctatcctgcacgctatcgtgccaatcccaaccgaaaaggaaaaataatgagcagcgaattgattgtacacaccagcgatgccgcttttgaaaaagacgttttaaatgcagatatccccgtcctgctggacttttgggctccgtggtgcggcccctgcaaaatgattgccccgattttggacgacattgccgccgaatttgaaggccgtctgaaagtggtcaaaatcaacatcgacgacaacgaagccaccccgtcccgtttcggcgtgcgcggcattccgaccctgatggtgttcaaaaacggcgaagtcgtcgccaccaaagtcggcgcattggcaaaaggtcagctgaccgcctttgtcgaagcctctatcgcctgataaagcgcaatcgaaaaagccgccggaagattccggcggctttttcgcacccttaagatttgtggcggatttcccagcacctatggatttttttgttgcggaaatcttcgggaacggattgtttggaaatgtctttgacggcgtattgttccgataccaagtcgtctaagacgaagctgcgcaggttgttggaaaagtacaaaatgccgtctgaagcgagcagcttcaccgcgccgtcaatcagctttttgtggtcgcgctggatgtcgaggatgtcggacattttcttgctgttggaaaaactgggcgggtccatcacaatgaggtcgaaccgcctgccttccccatatgccgtctgaagatattggaacacgtcggcgcggacgattttgtgtcgttccgtatcgatgccgttcaattcaaaattgcgtttcgcccaatcaagatatgtgttggacaaatcgacggtttcgctggatgccgcgccgccggtggcggcatagacggtgaagctgccggtgtaggaaaacaggtttaaaaaacgtttgcccgccgccgtttcgccgacttttttgcgcgtgtttcgatgatccaaaaaaagccccgtatccaaatacttatcaaggttgacccaaaacttgcggccgttttcggtgatgacgaaatcgtcgcccgccttgccggttttctcgtactgctgcaaacctttttggcgttcgcggcgtttgaggcggatttgttcgggcgcaaaaccggtaacgaaagcgacggcttccaagacttcggcaagccacgcttcgtattcttcgggccgcatcagccagccggtatcgtattcctgaaggtggattcgatcgccgtaaacatcggcggcaaaggggaattgggggatgtcgcggtcgtaaatgcgccaggcttcgatgccgttgcgtttcgcccatttcataaggtgtttgatgtttttgcccaagcggttggcaaacggtgtgatgtcggtcattggtttcaggcggaataaagtggaaaacggcaattttactgtaattaacgcccgattgcttgaccgtttcgggcaaaccctataccatccgtcgcttatcttgtcatacgaagccatcgccttccaacctaaaccgcccttacgggcgcgtttcttctgttgctttgattttgcaaagcatatctgtgcaggttgccgtcgatgtaaaccacaagcaagccgcttgcgacaaccctgtaacttcacattccccgtatcgttacccttccctgcttcaggccgtctgaacctttcggacgcgggcgttgttgtcttccaaggatagccatgtctattaaatttgccgatttgaaccttgataaaaacattttgtccgccgtcagcagcgagggttacgaaagcccgacgccgattcaggcgcaagccattccgtttgctttggaaggccgcgacatcatggcttcggcgcaaaccggctccggcaaaaccgccgcctttctgttaccgactttgcaaaaactgaccaaacgcagcgaaaaaccgggcaaaggcccgcgtgctttggtgttgaccccgacccgcgaactggcggctcaagtcgagaaaaacgcgctggcgtatgccaaaaatatgcgttggttccgcaccgtcagcatcgtcggcggcgcgtctttcggctaccaaacccgtgccctgagcaaaccggtcgatctgattgtcgccacgccgggccgtctgatggacctgatgcaaagcggcaaagttgattttgaacgtttggaagtgctgattttggacgaagccgaccgtatgttggatatgggctttatcgacgacatcgaaaccatcgtggaagcaacgccgagcgaccgtcagactttgttgttctccgccacttgggacggcgcggtcggcaaactggcgcgcaaactgaccaaagaccctgaaatcatcgaagtcgaacgcgtggacgatcaaggcaaaatcgaagaacaactgctgtactgcgacgatatgcgccacaaaaaccgcctgctcgatcatatcttgcgcgatgccaatatcgatcaatgcgtgattttcacgtccaccaaagccatgaccgaagtcattgcggatgaactgtacgaaaaaggtttcgccgcaaactgcctgcacggcgatatgccgcaaggctggcgcaaccgcacgctgatggatttgcgtaaaggccgctgcaaaattttggttgccaccgatgttgccgcacgcggtatcgacgtaccgaccattacccacgttatcaactacgacctgccgaaacaggcggaagactacgtccaccgcatcgggcgcaccggccgcgcaggccgcacgggtattgcgattacgtttgccgaagtgaacgaatacgtcaaagtccacaaaatcgaaaaatacattaaccgaaaactgcccgaactgaccatcgaaggcatggaaccgacccgcaaacgcaaatccgcaggcggcaagccgaaaggcaaaggcggctggggcgatcgtaaatccggcggttggcgcggcgatcataaaccgagcaaagaaggcttcggcggcaaaacgcgcggcgaaggtttcaagaaagaaggctttaagagagacggtttcaaaaaaaccggcgaaggcttcaaaggcaaacgcaaagccggcgattcttttgcaggcaaaggcgaacgccgttacaaagaccgctaagccccaacctgccgcataaaccaatgccgtctgaaaccgatttcgagtttcagacggcatttttgcaatgtttcagcaccgcccggctttgatacccaaaggattaggctgtaataaaaacccttttccgctttggcaacgattgaaaatttccgtaaattcaaatatctagattccttcctgcacgggaatgacacggaagggtttcagatgcagggtgggcattcctgcccacccaatcccgcccttgcaacggtgggcaagaatgctcgccctacggcttgactgttcgatatgatgccgtctgaaaacccaacggcggcatgacaatgccaccctgccaacgcacgtaaatcagaattgccatcccgacatcaaacgcttggaaacaaaatgccgtctgaaaatcaaacggcaacataacaatgtccctaacaaatgcaaaaatgccgtctgaaagctcttcagacggcattggcgcgccgggtttaccgcctcctgccgaaaccgcgcatagcggggcggcggtaattggcgggcgggcgcgttgtcgggcggtaacgctgcgcctgcgccgcctgttgttttgcacggaggctgcgcgtgttcaaatccctgctggtgcgcgcattggggcgtgcggactgatggtaggctgcacgcgcgcgccgggcgacgggactgtcttggttgcctgcccgtgtgaatttgtttgccagcgcgttgccgataaacgcgcctgccgccgcgccgaccaggctttgcagcagccagcttcctgtcgattggtcgtaaatatactgctgcccgtctttaccggtaacgggttgcccgttgttgccgtttgcctgtgcttcggcaggaatggtgtctttgactgcttcgggagtcagttggtaaaccgtatcgtctgcctgctgtgcgagctgctgttgcagggcttcaatctgtttctgctgctgttcgagccgcgcctgcgtgtcgtcttggcaggcggcgagtgcgaatgttgcgataagcgcggaggcgatgatttttttcatgtgtgtcctgtttgggtggaaaatcggttttattgtatcgccgtcgggaattttggcaagcattctgccggcaaatcgtgatgtttacaggggcagggtgtgcaatttgcggacaaatgcgaggctgttggcgactgggttgcctttgttttcgacttcgtgttcggtttctacggtcagcaggcggcggtttttgtgtttgttcaggctcaattcggcttgtgcgggtgtgaaaaacaggcggtgtttttcggcaaagcggcgggcgcggctgttggcggttttcaaaatctgaagcagcgatacgtccagatggaagcgtcgcacgcccaatacgagaatccgtgcggcaaaaaaatcggcggcatcggtaaactcggcggggctgctgcggctgaagtcgtgccgttcggcggctatcagggcggcaacggtgcggatttgcggaatcatcgattcgctgataagtgtgtcgtcccgccctgcatcgagaagcatgggggaaaaatcctgtgcatcatcgacaataatgctacaagtgtgcagggtttcgttttgtgcggcggtttggggcattgcattcatggtcattttcctgattctgtcgtgtgttgccgaatcgggcgacctgtgtgaaggtaacaaaaaagccgccccgttttcgagcggcctgttttgcgtatgggatggatttcaagcaagcgcaaaaaagtaccgcacgtctgtgtggtaccaatagcaataagcggttgtaaattttttgccttgcatgatgaaatgccgtctgaagataaaaatattggggagattctaaatcaaaacgctgccgcgcctcaagcattttatcgaaatttttttgatttttcatctatccgattgaaaatatttcggtttatttttaccgctgcccgatattgtcggcaatttccctttatctgctttgaaaaacggtgcataatcccgagcaaaaccgcaatcaggagcaattatgcaaaactatctgacccccaatttcgcctttgccccgatgattcccgaacgcgcttcaggcagccgcgtttgggatacgaaagggcgtgaatatattgatttttcaggcggtatcgccgtcaatgcgctgggacactgccaccctgcccttgtcgatgctttaaacgcgcagatgcacaagctgtggcacatttccaatatctatacgacgcgtccagcgcaggaattggcgcaaaaattggttgcaaacagttttgccgacaaggtttttttctgcaactcgggctcggaagcgaatgaggcggcgttgaagctggcgaggaaatacgcccgcgaccgtttcggcggaggaaaaagcgaaatcgtcgcctgtatcaacagttttcacggacgcacgctgtttaccgtgtccgtcggcggtcagccgaaatacagcaaggattatgcacccctgccgcaaggcattacgcacgttccgttcaacgatattgccgcgctggaagctgccgtcggcgaacagacctgcgcggtcatcatcgagccgatacagggcgaaagcggcatcctgcccgccactgcggaatatttgcaaaccgcgcgccgtctgtgcgaccggcacaatgcgttgttgattttggacgaagttcaaaccgggatggggcatacgggcaggctgtttgcctatgaacattacggcattgttcccgatattttgagttcggcaaaagccttgggctgcggctttccgatcggcgcgatgctggcgacagaaaagattgccgccgccttccaaccgggcacgcacggctcgactttcggcggcaacccgatggcgtgtgcggtcggcagccgcgcattcgacatcatcaatacgcccgaaactttaaaccatgtccgtgaacaggggcagaaacttcagacggcattgctggatttgtgcaggaaaacgggcttgttctcacaagttcgcgggatggggctgctactcggctgcgtgttggacgaagcctatcgcggacgcgcatccgaaatcaccgccgccgccttgaaacacggcgtgatgattttggttgcgggtgcggacgtattgcgtttcgcgccttcgctactgttgaacgatgaggatatggcggaaggtttgcgacgtttggaacacgcgctgacggaatttgccgcgacatcagacaatccgtaaaactcaaatgccgtctgaaggcgggaaggcttcagacggcatcagaaacaaaaaaccgcttcagaaacgtggttcaacgttccgaagcggttttgtttgccatcaggactcgaacaccaattccggttccctgccctcttcgatgactgccttaccgaccaccacttttttcaagcctttcaaatcaggcaggcggtacatcgtatcgagcaggcagcgttcgacgatggacctcaggccgcgcgcgccggttttgcgttccattgcctgacgcgcgatggaacgcaatgcgccttcttcaaactccagttcgacattttccataccgaacaacgcctgatactgcttgaccaaagcatttttcggctcggtcaaaatattaatcagcgcgtcttcgtccaattcttctaaagttgcaatcacaggcaaacgtccgattaattctggaatcagaccgaatttaatcaagtcttccggttcgacgatgccgaacagcttggtaatgtcggcattttcgtccttgctgtgaacggacgcaccgaaaccgataccgcctttttcagtacgctggcggatgactttttccaagcctgcaaacgcgccgccgcagataaacaggatgttggtggtatcgacgttgataaattcctgattcggatgcttgcggccgccttggggcggaacgctggccactgtaccttcaatcagtttcaacaaggcttgttgcacaccttcgccggatacgtcgcgggtaatcgacgggttgtcgcttttgcgtgaaattttatcgatttcgtcgatatagacaatgccgcgctgggctttttcgacatcgaaatcacatttgcccaaaagcttggtaatgatttgctcgacgtcttcgccgacataacctgcttcagtcaaagttgtggcatccgccatcacgaacggcacatccagtttgcgcgccaaagattgcgccagcagggttttacccgatccggtcgggccgataagcaggatgttggatttcgacaattcgacattagctcctgctttaggatggcgcaggcgtttgtaatggttgtacaccgacaccgccaaggctttcttggcttgttcctgaccgataacgtggtcgttgaggttggcgacgatttcggcgggcgtgggcagcttgccggattcttccggctcccctccggcactttccgaaggcgtgccgtcatttccgtcttcatgcaatatttcaatacagtttgagacgcattcgtcacagataaaggcgttttcgccctcaattaaatgtttgacgtgtgatttggattttccgcaaaaggaacaagtacggttttcgttggacatggctttctttacaatgtatgcgttacagaaaacggcacgtgccgttcgggttgccaagtataataactatatccgttcttatcaatgtattaccttaaaatcccgccgattaggctataatacgccctttcgcaaccgccccggcggcaaaaatgccgtctgaaaccaaatctgaaatctgaggatattcatgagaaaaccccaacgcggctatgcccgccaagaccgtgtcaaagaacaaattatgcgcgagcttgccgaactcgtccgtaccggactgaaagacccgcgcgccggcttcattaccgtcaacgaagtcgaagttacccgcgattacagccacgccaccgtgttctacaccattttaaaccaagacgcgcgcgaaattacggaagaagtgctggaacacgcgcgcggacacctccgcagcgaattggccaaacgcatcaagctgttcaaaacgcccgaactgcatttcaaatacgacgaatctttggaacgcggtttgaacctgtccgcccttatcgaccaagtagcggcggaaaaaccggttgaagactgacggatatgcccatgccgtccgaacatcgaaccatgaatacaggcaaaccccaaaaacgtgccgtcaacggtgttttgctcttggacaaacccgaaggcctttccagcaacaccgcgctgcaaaaagcgcggcgtttgtttcatgccgaaaaagccggacataccggcgtgctcgaccctttggcaaccggacttttgcccgtctgcttcggtgaagcgaccaagttcgcccaatacctgctggatgccgacaaagcctacaccgccacgctgaaactcggcgaagccagcagcacgggtgatgccgaaggcgaaatcattgccaccgcccgcgccgatatttccttagccgaatttcagacggcctgccaagcactgacaggcaacatccgccaagtgccgccaatgttttccgcgctcaagcacgaaggcaaaccgctgtacgaatacgcccgcaaaggcatcgtcatcgaacgcaaagcgcgctacattaccgtttacgccatcgatattgccgaatttgacgcgcccaaagccgtcatcgacgtacgttgcagcaaaggcacctacatccgcaccctcagcgaagacatcgccaaacacatcggcacgttcgcccacctgaccgccctgcgccgcactgaaaccgccggctttaccatcgcccaaagccacacgcttgaggccttggcaaatttgaacgaaacagaacgcgacagcttgctgctaccctgcgacgtattggtttcacactttccccaaaccgttttaaacgattatgccgtccatatgctccactgcggacaacgtccgcgtttcgaagaagacctgccttccgacacgccggtacgcgtttacacggaaaacggccgctttgtcggtctggcggaatatcaaaaagaaatatgccgtctgaaagccttgcgcctgatgaacacggcggcatccgccgcctgaacggcggttaaaaatacaggctgtgcttgaataatgtgttgatatttccgcaaaatcccgacacactcggacacccgccccgcttatcgcaactttgcgaacgcccccggaaacagcaaagacatcaaataattgattttattagaatctatttgcaaagccatttgccgttacacaagaatggcacattaaaataactgatgaggatttataacgatgaagacagacattcaaaccgaattaacccaagccctactaccacacgaaaaagtatgggcgaacgaagaaaaaaccattttagccaaaaacatcctgttggatttggtggaaaaaaccgacccgaccattatcggtttgttattgagtaatgatgagttaaaacgccatttctttgtggaagtgaatggtgtgctggtgtttaaattgcaggatttccgttttttcttggacaaacacagcgtcaataattcctacacaaaatacgccaaccgcattggtttgacggacagcaaccgctttttgaaagacagcagtgatattgtgttggattttccgtttaaagattgtgtgttaaatggcggacaaagcaccgaggaaggcgaagaaatttattttaaacgcaataacagccagccagccagccagccagccagccagccagccagccagccagccagccagccagccagccagccagccagccagccaattatacactaaattaacccgaaaaagacaagaaatcttttttaatcaaacccttgcttttgatgaaattgatcggctttttgacgcaaaagcattctcaaaattctctcgctataccgcagacggcaaacaagccgttggcgaaatcaaacgacattcagacggcacacccgccgaaaatctcattatcaaaggcaataatctgattgccctgcattcgcttgccaagcagtttaaaggcaaagtgaagctgatttatattgacccgccatataacacgggtaatgacggttttaaatacaacgacaaatttaatcattccacttggctgacttttatgaaaaaccgtctagaaatcgccaaagagctgcttatgaaagacggttcgatttttgtgtcaattgacgacaacgaacaggcatatttgaaaattttaatggatgaagttttcggaaatgaaaatttcatctgcaattttatttgggaaaaaaagacaggtgcgtccgatgccaaacagatagcgactattacagagtttgtcttatgttactcaaagaactttaaaacagttaaattaaataaaaacacgttttcttatgatacagagagatacaaattaagtgataagtttgaacaggaaagaggcaaatattatatcgacaatttagatagagggggattgcagtatagtgacagtttgaattttgcaatccaatgtccagatggcacttttacgtatccgaatggcaggactgaatttgtcaatgatggctggatatggaaatggagtaaaaataaaattgattgggcaataacaaacggttttttggagtttagaaaatcaaagtctaaaaaatctggatggagtgtatgttataaaaactatatgttggttgataacgaaaacaagccgatagaacgttctgctccctataagaacttaatacaggatatcttaaatacacatgcgacagatgaattgaaaaaactgttcggcagcaaagtttttactactccaaaacctgagagcttattgcagtatcttattcaaattgccacatccgaatccgacatcgtcttagactaccatcttggtagtggcacaaccgccgccgttgcccacaaaatgaaccgccaatatatcggtattgaacaaatggattatattgaaacgcttgctgttgaacgcttgaaaaaagtgattgatggcgagcaaggcggtatttccaaagccgtgaattggcaaggtggtggcgagtttgtttatgccgaacttgccccatttaacgaaaccgcaaaacaacaaattttggcttgcgaagattcagacggcatcaaaacgctgtttgaaggtttatgcgaacgctatttcttgaaatacaacgtcagcgtaaatgaatttagtcaaatcattcaagagcctgaatttcaatctttgccattagacgaacaaaaacaaatggtgcttgaaatgttggatttaaatcaaatgtatgtttcattatccgaaatggatgacgaacaatttgcagattgcctgaacgatgatgataaagccttaagccgtgcattctatcaatcagtaaaaaatcaagcggagaaaaaagatggcgaataataaaacgttgtttgaagtgattgaaaatgaacgtaaagcggttaaaaaatacaagcctgaattacttgaaatgccagaatttacgtccaaaaacttaaaatatgatttttttgaatggcaaaaatctgcccttgaaaactttttgatttttgaccgcacttcaaagctagacgatttccctgatttaaaaaataagccaacgcatttgctgttcaatatggcaacaggtgctggcaaaacgatgatgatggcggcgttgattttgtattattttgaaaaaggttatcggcattttctgttttttgtgaatcaaaacaatatcgtggataaaacggaaaataattttaccgatccgacgcacgcaaaatttttatttaccgagaagattttgcagggcgatacggtaattcctattcgcaaagtggagacatttagcccacattcagacggcattgaaattaaatttaccagcattcaaaagctgtataacgatattcgcacccggcgggaaaatcaaaccacattggcggatttgcacaaattgaaccttgtgatgctgggtgatgaagcgcaccatttaaacgcgcaaaccaaaggcaaaaaacaaggcgaattagatttagaaaaggaaatgaacgaccgcaccagcaatgccgaaattgaacgtaaaggctgggagcatatggttttggaattgttactcaataaaaatggcaatcatagccaaaatgtgctgttggaatttaccgccacgctgcctgaaaatgccgatgtacaacaaaaatacgctgataaaatcatcacaaaatttggcttaaaagaatttttgcaaaaaggttataccaaagaaatcaatttggtatccagtacgctgggtaagaaagagcgagtgttacacgctttattgtttgcttggtatcgacatcgaattgcgttgaaatatggcattgccaatttcaagcctgtgatgttgtttagaagtaagacgattgatgaatcaaaagcggattatctggcatttttaaattgggcagaaaatgtgcaggcggttgatttttcgtttttaactacattttcaacaagcttgaacgatagcgatagcgataacgccaacgaacaaggcaaaacccgcactgaacaagccctaaaatttatgcaggaaaaaggcgttgagtttgcacatttggcagattgggtaaaacaaaattatcaaaaacacaatgtgattattaccaactccgaaaccaacaaaaccaaaaccgaaaaaaccgacagcgaaacagaaaaattgctgaataatttggaagcggctgataatccgattcgtgccatttttacggtggacagattaaccgaaggttgggacgttctgaatttgtttgatattgtgcgtttgtatgaagggcaaaacggcggcggttcaaataaaaaatcaggcaaaacggctgccgctactgtatcggaaaagcagttgattggtcgcggcgtgcgttattttccatttgcgtttgaaggtaaacagccgaataaacgcaaatttgacaacgatatgcaacacgaattgcgtattttggaagaattgttttattacacgcacgatgagcaatctcgctatattacagaactgaaaaacgagttacgaaaagacggttatttgcctgaaaaagacgatgataaggtattggcaacatttaaactcaaatctgaatttgccgataatcaggattttagagagttgttaatttgggcaaataaaaaaatccccaatcccaatgccagagccaataatgcagacagcctgaaagccaatccgcaaacgcttccattccaagttcacggcaatcaactgttgcaggaaacgcaatttacagccgatgaaaatgatgaaatagcccgacaaatcgacacacaaaataattttactcaaatcataaaaatgagtgaaatggaacggcacattttcaataaatccctgcatatcaaaggaaaaaatggtcaatctttattccattttgaccgcttgcaaagcaaactcaacatttacaatcgcaatgaattgcaaaataacttgttaaaagattgacaaattgaatttttgggattagggcaagacaaacagatcagcccagatgacaaacttgcaggctgcctaaaaatcttggaaatggttgaaaaacatttgaatgaaagtgatatgccatttatcggtacaaaagaatttacgcctaaaaaattgtgggaaatttttggcacaccaaaacaaaaatgggtcaaaaaagatgatataaaaactgccattgccacgcaaaatgattggtatgtgatggataattttgctggaacgagtttggaagaagcgttaattcaatttatttcagagcatttgggcgatttgaagtctaaatatgatgttcatttaatccgtaatgaagaagtgtttaaattgaataacttttccgatggtgaaggatttatgccggactttattttattgctgaaaaataaacaaaaatcttcttccaatggtgtggatgactttttgcattaccaaattttcattgaaccaaaaggtgagcatttggtggaaaatgattcgtggaaagacgcttttttaaaggcaattacagcggaatacgggacggataagattctgcaaaaagatacaccgcattatcgtttgatcggtttgccgttttttactgacaatcaggaaaatgaacaatttacaaagtcattccctttaggggcggcatcgcttgaaaaatagagtggtgcattgcaggcaaccccgtttgacaaaacttcctttacaaaagggcgttttgtcagatatttaatcaacacattattaaaatacagccaaattttaatgccgtccgaaccctgtgttcagacggcatcgtatttttcagtatctaaaccgtttccctgccccaatctttgcctctcaaaatcgaagcatcgacatcttgaatatcgcggtgtcccgtaaacgccatagatatatccatttctttatacaggatttccagcgcacgggttacgccttcttctccatacgcgcccaagccatacaggaacgcccgacctatcattgtacctttcgcgcccaaagcccacgccttcaaaatatcctgaccgctgcggatgccgctgtccatccaaacttcgatgtcgctgcccactgcgctgacgatgtcgggcaaggctttgatggcagacacggtatcgtcgagctgtcgaccgccgtggttggaaacaatcaatgcgtccgcgccgcttttcgctgctttttccgcgtcttcaggttccataatgcctttgataatcagcttgccgccccacaaatctttaatgcgcgccacatcgtcccagctcaggcgcgggtcgaattgttcggaagtccatgaagacagcgaagacaaatcgccgacgttcttcgcgtgtccgacgatattgcggaacgtgcggcgttccgtgttcagcattttcatacaccattcgggcttggtcgccagattgattaaattggcgatggtcggtttcggcggcgcggacaggccgtttttgatgtctttgtggcgttgccccaaaacctgcaaatcagcggtcaataccaatgccgaacatttggcatccttcgcgcgcttaatcaggttttccataaactcgcggtcgcgcatcacataaagctgaaaccaaaatggtgcggaagtgttctcggcaacgtcttcaatcgagcagatagacatcgtggacagcgtaaacggaatgccgaacttctccgccgcccgcgccgccaaaatttcaccgtcggcgtgtgccatacccgtgaaacccgtcggcgcaatcgccaccggcattttcacatcctgcccgatcattttggtttccaggcttcggccttccatattgaccaatactttttgacggaagcggatgtctttgaaatccgaagtgttttcacggtaggtagtttctgtccacgaacccgaatcgatgtaatcgtaaaacatacgcggcattttgcgcttggcaacgcggcgcaagtcttcgatgcaggtcattttgctcaaatcacgtttcatttgtcgccccctgaatacctgaataactttatatgaaatcgataatgtatatcaatattgattataaggcaaatcatttcaacatttgccgcatccgccgcagctccctactttaagcgacataaggtttaaaattcaaaaataacaaattaaaatcaaaatattaaaaatcaatcaatctatcgatttaaacagccaatcacacaatccgccctcatacttgactgaaacactcagatattggacaattccacccactaataaaaaaaccgacatgggcaaccaccaccatgagactgaccaccaaagggcgtttcgccgttaccgctatgctggatttggcgatgaacgcgcaaaccggcgccgtcaaactcagtgccatcagcgaacgccaaaacatatccctctcctatctcgagcaattgttcggcaaactccgccgcgccggacttgttgaaagcctgcgcgggcccggcggcggctacatcctcgccgcaccggcggcacgcatcaacatcgcccaaatcatcgccgccgccgaagaccggctggacgcaacccaatgcggcagcaaagccaactgccaccacggcgcgccctgcctgacgcacgatctttgggagaatttaaacaaaaccatcaacgactacctcggcagcgttaccctgcaaagcatcatcgaacagaaaaacaacggcgacggcagccgcgtcgtccaatttacacacatccattaaataacacccgaaaaagaaagagcaaaccatgaccgtcaaaacccccgtttacctcgactacgccgccaccccccccgttgacaaacgcgttgccgaaaaaatgattccctatctgaccgaaaccttcggcaacccagcctccaacagccacagcttcggctgggaagcagaagaagctgtagaaaaagcacgtgcagacattgccgccctgattaacgccgactctaaagaaatcgttttcaccagcggcgcaaccgagtccaacaacctcgctatcaaaggcgcggcgcacttctacaaatctaaaggtaatcacctcatcactgtaaaaaccgaacacaaagccgtactcgacaccatgcgcgaactcgaacgccaaggttacgaagtaacttatctggacgtacaagaaaacggtttggttgatttagacgtactgaaagccgccatccgcgaagacaccatcctcgtttccgtaatgtgggtaaacaacgaaatcggcgtggttcaagatattcctgccatcggcgaaatctgccgcgaacgcaaaatcattttccacgttgacgcagcacaagcatgcggcaaagtgcctgttgatgttgaagccgcaaaagttgatttgctgtctatgtccggccacaaagtatacggccctaaaggcatcggcgccctgtatgtacgccgtaaaccacgcgtccgcctcgaagcccaaatgcacggcggcggtcacgaacgcggtttccgttccggcacattgccgacccatcaaatcgtcggcatgggtgaagccttccgcattgccaaagaagaattggcacaagacactgcacactacctgaaactgcgcgatattttcctcaaaggtatcgaaggcatcgaagaagtctatatcaacggcgacctcgaacatcgcgtcccgaacaacctaaacgtcagcttcaacttcgtcgaaggcgaaagcctgattatggcagtgaaagaactcgccgtatccagcggctccgcctgcacctccgcctcgctcgaacccagctacgtcctgcgcgcgctcggccgcaacgatgaactggcgcactcatccctgcgcatcaccttcggtcgcatgaccaccgaagaagaagtgcaattcgccgccgaactgattaaatccaaaatcggcaaactgcgcgaactgtcgccgctgtgggaaatgttcaaagacgggattgatttgaactcgattgaatgggcagcgcattaaagcgtaccaacatgccgtccgaacctttagacggcattccaaaaacaaagcaatcaagagaaaatatgaacgaacaagatttagatttggacaatctcgacaacctgcttgaagattttgacggcgttaccgtggaaggcggcgtcgattcggaaaacgacgacggctgcgaaggcggggcgtgcaaaatctaaacttcaggccgtctgaaaatcggcaaacaaaccacttaaaccatcaaaaaacattaaggaaaccacatcatggcatacagcgataaagtaatcgaccactatgaaaatccgcgcaacgtcggcacattcgacaagggagacgattccgtcggcaccggcatggtcggcgcgcccgcctgcggcgacgtcatgcgcctgcaaatcaaagtgaacgacgagggcatcatcgaagatgcgaaatttaaaacttacggctgcggctcggccatcgcttcgtccagcctgattaccgagtgggttaaaggcaaaagcctggatgacgcgctggcaatcaaaaacagcgaaatcgccgaggagttggaattgccgccggtaaaaatccactgctccatcttggctgaagatgcggtaaaagcggccgttgccgactaccgcaaacgtcaggaaaacagataaagcccttcagacggcatcatcccgcaatgccgtccgaaccacccgccgcttcaggtccgtccggggcggtacaacaaggaagaaatatgattacccttaccgagaatgccgcaaaacacatcaatgactatctcgccaaacgcggcaaaggcttgggcgtacgcttgggtgtgaaaaccagcggctgctcggggatggcgtacaaccttgaatttgtcgacgaagccgatggcgacgacctgattttcgaaggacacggcgcgcgcatttatatcgatccgaaaagcctggtttatctggatggcacgcaagtcgattacaccaaagaaggtttgcaggaaggtttcaaatttgaaaaccccaatgtcaaagactcctgcggctgcggcgaaagcttccacgtttaaggcataaaaacggcgggaccgtatcaaaaccgtcccgccattttttcgcttcctgcctgttgtagctgcctttgcctttccttttccgttccaccttgtgccggaacaaatcggatttcactaaggcttttaaagcattgtcgcgtattttgcctttattgtgctgcactttgccgcccatattcagtcctttcgtttaagaagcggcagattataaggcaaaaacagttttctgccaaaatcttacatttatcatcctactatgtcccaatatttcaccctcttccggattgaacccgctttcgatatcgacaccgaaaacttggaacaaacctaccgcgccttggccgcccgtttccatcccgataaattcgcttcagcttccgcctttgagcaaaagcaggcagtgatgatgtcttccaccatcaacgatgcctaccgcaccttgaaaaaccccatcgaccgcgccgcctacctgctgaaaacatcgggcatcgatgccgacgcgccggagcataccgctttcgcccccgaattccttatgcagcaaatggaatggcgcgaaacgctgatggaggcacgggcaggcaacgaccttgaatccttgaaaaatctcgacaacgaaatccgcgacgaacaagaaaaactgttctgcggtctgaaacagtcgtttgcccgacaagattacgacacagccgcacaacaagtccgccaaggcaggtttctcgacaaactccgcaacgaaatttcctcggcattataatccgcaccgtgtttcagacggcgtaaccgccgcaccgttccgcgtcaaaatatgctaaaataagcaacaattttttgccatacgaaacattgaaaccatgaccgacgcaaccatccgccacgaccacaaattcgccctcgaaaccctgccggtaagccttgaagacgaaatgcgcaaaagctatctcgactacgccatgagcgtcattgtcgggcgcgcgctgccggacgttcgcgacggtctcaagccggtacaccgccgcgtactgtacgcgatgcacgagctgaaaaacaactggaatgccgcctacaaaaaatcggcgcgcattgtcggcgacgtcatcggtaaataccacccccacggcgataccgccgtatacgacaccatcgtccgtatggcgcaaaatttcgctatgcgttatgtgctgatagacggacagggcaacttcggatcggtggacgggcttgccgccgcagccatgcgctacaccgaaatccgcatggcgaaaatttcccacgaaatgctggcagacattgaggaagaaaccgtcaatttcggcccgaactacgacggtagcgaacacgagccgcttgtactgccgacccgtttccccacactgctcgtcaacggctcgtccggcatcgccgtcggcatggcgaccaatatcccgccgcacaacctttctgataccgtcaatgcctgcctgcgcctgctcgatgcacccgacaccgaaatcgacgaactgatcgacattatccaagcccccgacttcccgaccggggcaaccatctacggcttgagcggcgtgcgcgaaggctataaaacaggccgcggccgcgtcgttatgcgcggtaagacccatatcgaacccataggcagaaacggcgaacgcgaagccatcgttatcgacgaaatcccctatcaggtcaacaaagccaagctggtcgagaaaatcggcgatttggttcgggaaaaaacactggaaggcatttccgagctccgcgacgaatccgacaaatccggtatgcgcgtcgttatcgagctgaaacgcaacgaaaatgccgaagtcgtcttaaaccaactctacaaactgactccgctgcaagacagtttcggcatcaatatggtggttttggtcgacggacaaccgcgcctgttgaacctgaaacagattctctccgaattcctgcgccaccgccgcgaagtcgttacccgacgtacgcttttccggctgaagaaggcacgccatgaagggcatattgccgaaggcaaagccgtcgcactgtccaatatcgatgaaatcatcaagctcatcaaagaatcgcccaacgcagccgaggccaaagacaaactgcttgcgcgcccttggcgcagcagcctcgttgaagaaatgctgacgcgttccggtctggatttggaaatgatgcgtccggaaggattggctgcaaacatcggcttgaaagagcaaggttattacctgagcgagattcaggcagatgctattttacgcatgagcctgcgaaacctgaccggcctcgatcaagaagaaattgtcgaaagctacaaaaacctgatgggtaaaatcatcgactttgtggatatcctctccaaacccgaacgcattacccaaatcatccgcgacgaactggaagaaatcaaaaccaactatggcgacgaacgccgcagcgaaatcaacccgttcggcggcgacattgccgatgaagacctgattccgcaacgcgaaatggtcgttaccctgacacatggcggctatatcaaaacccagccgaccaccgactatcaggcgcagcgtcgcggcgggcgcggcaaacaggcggctgccaccaaagacgaagactttatcgaaaccctgtttgttgccaacacgcatgattatttgatgtgctttaccaatttgggcaagtgtcattggattaaggtttacaaactgcccgaaggcggacgcaacagccgcggccgtccgattaacaacgtcatccagttggaagaaggcgaaaaagtcagcgcgattctggcagtacgcgagttccccgaagaccaatacgtcttcttcgccaccgcgcagggaatggtgaaaaaagtccaactttccgcctttaaaaacgtccgcgcccaaggcattaaagccatcgcgctcaaagaaggcgactacctcgtcggcgctgcgcaaacaggcggtgcggacgacatcatgctgttctccaacttaggtaaagccatccgcttcaacgaatactgggaaaaatccggcaacgacgaagcggaagatgccgacatcgaaaccgaaatttcagacggcatcgaagatgaaaccgccgacagcgaaaacgcactgccgagcggcaaacacggtgttcgcccgtccggtcgcggcagcggcggtttgcgcggtatgcgcctgcctgccgacggcaaaatcgtcagcctgattaccttcgcccctgaaaccgaagaaagcggtttgcaagttttaaccgccaccgccaacggatacggaaaacgcaccccgattgccgattacagccgcaaaaacaaaggcgggcaaggcaatattgccattaacactggcgagcgaaacggcgatttggtcgccgcaaccttggtcggcgaaaccgacgatttgatgctgattaccagcggcggcgtacttatccgcaccaaagtcgaacaaatccgcgaaaccggccgcgccgcagcaggcgtgaaactgattaacttggacgaaggcgaaaccttggtatcgctggaacgtgttgccgaagacgaatccgaactctccgacgcttctgtaatttccaatgtaaccgaaccggaagtcgagaactgaaaatcatctcccgatgccgtctgaagattcagacggcatttattttatccctcatccgtcatccagcttctcacaatatagcggattatagtcaattaaaaacaaggggctgtcctagataactagggaaattcaaattaagttagagttgcccctatgagaaaaagtcgtctaagccggtataaacaaataaactcattgaactgtttgtcgcaggtgtaactgcaagaacgacagcagagttagtaggcgttaataaaagtaccgcagcctattattttcatcgtttacgattacttatttatcaaaacagtccgcatttggaaatgtttgatggcgaagtagaagcagatgaaagttattttgctgaacgacaaaaccatatcaatggaattgagaacttttggaaccgggcaaaacgtcatttacgcaagtttgacggcattcccaaagcgcattttgagctgtatttaaaggggtacgaacggcgttttaacaacagtgagataaaagttcaaatttccattttaaaacaattagtaaaatcgagtttatcctagttatctaggacagccccaaaaacaaaatagtacaatattcaactttgaaggtctaaccatggcatactctgcggacttaagaaacaaagctttaaactatagtggattaaatttaaatcaggacaaggcgacgaagccgcagacagtacaaatagtacggcaaggcgaggcaacaccgtactggtttaaatttaatccactatattacgaacaatgcaaaaacatcagccaaaccgcagcaacgtttaacttgtcaagaaacacgctttacctgtggattcgccttaaaaaacaaacaggcagcctaaaacatcaagttaccggtctaaatgccgtcaaatcggataggcaaaaaccggctcaatatgttgggcaacacccggatgcctatctgcatgaaatcgccaaacattttgattgtacggcagccaccatttgctatgcactcaaacagatggggataacgcgcaaaaaaagaccaccacttacaaagaacaagacccggccaaagtaacgcattatttgacacagccggccgaattttccgactaccaacgtgtttatttggatgaaacaggatttgaccgctacctgttccgtccctatgcccgcagcctgaaagggcaaatagtgaaagcgcagataagtggaaaaagatatagtggattaacaaaaatcaggacaaggcgacgaagccgcagacagtacaaatagtacggaaccgattcacttggtgcttcagcaccttagagaatcgttctctttgagctaaggcgagccaacgctgtatcggtttaaatttaattcactataaaaacgacaaaaacgcaaaagccgccgacattcccgcatccaagtttcagtcaatcagataaccttggatttctttggttttcgcattgatttctctggtacggcagtcagattgtgccacgccgtattcgtcgccgtcggcgcatttggcattcaaaccgttttgtcagttgcggtactcgggcatgacggtttcggcaatatcggcgggcagtgcctgaaccgcgctgttcagagccgctttgacagttctttcttgtccgcttccctggccatttcgtcgataagggcttttttacggttgtgcagctcttccaagcgtgcttcggttttcgccgttttgcatgccagttcgctgaattttatgccgtttggcgttttaccttcagctttcgcattgttggcacagattttatccatcccgcttttccatgttttctgtgaggcttgcagcttattctgtacggtttgaggcaatcctttccagaactgctcgaactcgctgcgcgacagcttgtagcgttcttcccattcggatacgcgggcggcttcctgctcccgacccaatgcctcctgcgccgccgcttcttctgccgcttcaagttcttcgttcctttgtttcactttgtccaacggctctttaatcagtgccatagctgcggaacatatatgtttaaatttatgcaaaccatcatatcgggattgcacacgctctgcaagtttaccgacggttttcctgttcgataaaaatgccgtttgaaacggtcggcgttcagacggcatttttccgcaggttttatttgcggttggtctgcaggtagaggttgatcaggcgttcggtcgaactgtcgtgcttttgcggcccggtttcgccggtcagttcgcccaaaatggttttagccagttgtttgccgagttccacgccccactggtcgaagctgttgatgccccaaatgatgccttgtacgaaggttttgtgttcgtacatggcaatcaggctgcccatattgcgcgggttgaccttgtccatgagaatgaggttggtcgggcggttgccggagaaggttttgtgcgggaccagctcttcgatgcgcacctcatccataccctgcgctttgagttcggcgcggacttcgtcgggggttttgccgcgcataaaggcttctgcttgggcgaagacgttggcaagcaggatttcgtggtgtccgggcaggttgctgcgtttttcaagcgaggcaatcaggtcgatgggggtaatgtgcgtgccttggtgcagcagttggaaaaaggcgtgctggccgttaatgcccgtttcgccccagataatcggcgaggtttcgtgtccgactgctttgccgtccaacgtaacctgtttgccgttactttccatatcgagctgctggatgaatttgggcaggcggtgcaaatgttggtcgtaaggcgcgatgacgtggctgccgccgccgtagtagttgatataccagatgccgatgagggcgagaatgacgggcaggttgcgctcgagcggtgtgttgatgaagtgttggtccatcaggtgcgcgccgttgagcatttcaatgaagttttcttcgccgagatacagcataatcggcaatccgatggcggaccacaggctgtaccgaccgccgacccaatcccaaaattcaaacatattggcggtgtcgatgccgaattcggcgacggctttttgattggtggaaacggcggcgaagtgtttggcaacggcttcttcgtcgcccgcatgattcaaaaaccattcgcgcgcggtcagcgcgttggtcagcgtttcctgcgtggtaaatgttttggaggcgatgatgaacaacgtggtttcggggtggactttggacaatacgtcgcgcagttgcgagccgtccacgttggagacgaagtgcatattgaggcgcggatgaccgaaaggtttgagcgcggtacacatcatcagcggacccaaatccgatccgccgatgccgatgttgacaacgtcggtaatgacttggttggtatagcccagccagcttccgctgcggacttcgtgtgcaaattcgcccatacgttgcaaaacgcggttgactttgggcatcacatcttcaccgtcaaccacaatcggcgaattggtgcggttgcgaagggcgacatgcaggacggcgcggttttcggtggtattgattttttcgccgtggaacatctgccgcatccgctccggcacgcctgcttctcgggcaagctcgaacaaaagcgacatggtttcgtcgttgatgcggtttttggagtagtccagcgtcagtccgccgacttgcagccagtagcgttccgcacgctgcgggtcttgctcgaacatttcgcgcatatgcaatgttttgctgtcgtcaaagtgattccacaatttcgaccatgcgggtaagtcgtgaaggtgtttcatctatatgctcctgaatgaggttttttgttgtgggatgaaaaggctgccggaaactgccgcaagccgccgacgaccgttgttcggcatttcagacggcatttgtgggatgccgtctgaaggtcaatctttgtcgtaatcgatgtgcttgttgtgtatgctttttttgcttttctgcaattgcaggctggcagcatcgcccaagcgcagggcaagtccgatggcgagaatgtcgatgacggcaagctgcaagaggcgggaaaccatgggcgtgtagagttcggcattttcctgtgtggcaacgctcaacacgcagtcggcaagttgcgccagaggcgaatcgttgcgggtcagtgcgatgacagacgcgccgttttctttggcgatgctgaccgcatccaaaagttcgatagacgaacccgtgttggaaatggcaaccaaaacatcctgatcgctcaaaacagatgccgccatcagctgcgtgtgcgtatcgacataggcgacggtggacatgccgaaacggaaaaatttatgctgcgcgtcctgtgccacaatgccggaattgccgacaccgtaaaactcgacgcgacgggcgtgcatcagcgtggcaatggcgttttccagctccgactctttcaggaagcggcgttcgcccaacagcgaggcggcggcattgcccaacactttctcgaccacgcttgccatatcgtcgtcggcgttgagttcttcgtggacatagggcataccctcatgaccgatgctggcggacaaggcgagcttgaactcgggcagccctttataacccaagctgcggcagaatcggatgacggtcggctggctgacggacgcacgttcggcaatttcggcaacggcggcatggacgaaccatttgggttccgccaatgcacattcggcgactttgcgttccgcaccggaaaggtttgccagtgattcgctgattttgcttaacataatgatatgcccttcgataatgcagccccgctgcaaggagccgctgtggttaaacgtttctcaaatggttgtcaagagccgcagccgcaccggaaattccgggaaactcgctcaagacgacatacacgggaatcgcggcaagatatgcttcaaacctgcccttgttctcgaaacggctgcggaacggggaagttttgaaatattccaacacgcggggaataatgccgccacacaggtacacgccgccgcgcgcgcccagcgtcagggcgaggttggaagcaaccgtgccgagcatggcgcagaagatgtccaaagtctgacggcacaaaggcgacgcgccgctcaaagccttttccgtgatttcagacggcatcagtttggcgggtttggctttctgttttgcagccaaagcctcgtaaaccaagctcaagcccgcgccgctcaaaaagcgttcggcggaaacatggccgtatttgtttttggcgtactgccaaatcagcacttccatatcgtcaaacggcgggaaactggtatgcccgccctcgcccgccaaagccacccagcctgcgtggctgtgcaccaatccgctcacgcccaggccggtaccggggccgataacggctttgggggcaaattcgacaggcttttgcccgcctacctgcatcaggtctttgcttgaagtctgcgttaccgccaatgcctgcgcggtaaagtcgttcaaaaggatgagggtgtccagccccaaagtctgacgggtggtttcgatggaaaacgcccaatggtggttggtcatctgcacccagtcgcccaaaatcgggttggcgatggcaaatgccgcgtgccgtacggctgttgcaccgctttgattcagataggcacgcaccgcatcggtaaccgtatcgtagtctttacacggaagcacggcggctttttcaatgacgcgcggcgcggtttccagcgcaaagcgtgcattcgtcccgccgatatcggcgaccagtcggggatatccggcttgtttattcggcgtagaagacatggcagttcactccttgatggttcaaaacgaggttgatcggatattcgcggttttcgccttgtgcggcttggtcgaacacggcttttttctcttcgccccgtatcgccaaaaacacatgccccgtatgggcaatcgcatccaaggtcatactgacgcgctcgtgcggcgcggtaacgggcgtggtatgcaccaacgcgacacctgccgaaccgtcgattgccgtctgaaactgcggagctttcgggaaaatcgaagccgtatgcccgtcgtttcccatacccaaaaccaaaacatcgggctgtttgtaatgtttcagtgcataatcgacaacagcatcgggatgtaattcggtttcagtttttccgtcttccaccataggaatccacattgccgcttccgctttgttcttcaacaggtattcgcgcaccaaaccggtattgctgtcggcgtggacggtcggcacgatgcgttcatctgccaaggtgatgccgacgtttttccaatccaaatctttttgcgacagggcgttgaaaaatgcaatcggcgaacgtccgccggaaactgccaacaccgcaccgcccttctcgtccagtgcgccctgcaaagcatccgccactgcgtcagccaaagactgcgccgcttctgccgcattttcgtattcgtgccaaacaaacatatttgtgtcctttttttatttcagacggcatattccgttatggaaacgggttgagcaatatgtcggccgaacagttgtttatgcttttgataccaaatatcgggactgctttttatagtggattaaatttaaaccagtacagcgttgcctcgccttgccgtactatttgtactgtctgcggcttcgtcgccttgtcctgatttttgttaatccactatactactttacttatgttcagacggcatttcaaaccccatgccgtctgaacgcattattgtattactgctcttcgtgccacttgtgtccgtcgcgcgccaatagttcgcgcgcggcttcaggcccccacgagtgtgcgccgtagccgtgcggcggcgtggtgttatttgtccagttttccaaaatcggcatcacatattcccacgcggcttcaagttcgtcgcggcggttaaacaaagcgagtttgccgttaatcacatccagcagcaggcgctcgtaagcttccgcgcggcggccttccaatgctttgcccaaatcggttgccagcggcacggtttcgaccttatttcctgcccccggggttttcatctgcgtatagaggcgcacggattcatatggttgcaactcgataacgagccggttgggcgcggtgcggctgccttcaaaaatatggctgttcaaatctttgaagttcaaaacgatttccgccactttgcccgccatgcgtttgccggtacgcaggtagaagggaacgcccttccagcgttcgttttcgatttcggctttaatggcgacgtaggtttcggtaaagctgtcttgcggaacgttgatttcttcaagatagccgttcatgcctctggcggcggtatattgtccgcgcacgacgttttcattgacagactcgacggtcagcggcttcaatgacttgatgactttgactttttcatcgcgcaccgcgtcggcatccaagctggcgggggcttccatcgcagtcatgcacaacatctgcatcaaatggttttgcaccatatcgcgcaacgcgccggtaatgtcgtaaaactcaccgcgctcttccacaccgagctgttcggcgatggtcaactgcacgctttcgatatatttattgttccacagcggctcgaacattacattggcaaaacgcagcgcaagcaggttttgcaggctttctttgccaaggtagtggtcgatgcggtaaatttgcccttctttgaaataacgcgcaacatcggtattgatttgctgggaagaagccaaatccgtacccaacggtttttccaaaactacgcgcacattgtcggcattcaaaccgatcgcagcaaggttttcacaggcttgcgcgaagaatttgggcgcggtggacagatagatgacgacgttgtcggtttctttgcgcgctttgaccaaatcgcccaaagcggcaaaatcgtccggctgcgtaacatcgactttgagatatgcgaaacgttcgacaaacgatgcccaagcctcatcggaaaaattttctttcacatggattttggaactggtttccaccttcgccagaaaaccttcggtatccaactcgctgcggctgacccccaaaatacgcccttcgggatgaagcagaccggcaacatgcgcctggtacagacagggcaacagcttgcgcatcgccaaatcgccggtcgcaccgaacaacaccaaatcaaaatttgtttgtgtactcatcgtattatctcgtcaggaaagaatttttcgatgccgtctgaaacctgtttcccccatcacgctgcatcgcaatatcggaaacaaaggcaggcggcataatgagtagtaatactacacaccgctacactttttgtctattcccatttttacaatttatttgacctagtccaaaaatcgggcaggtttcccctattccgttacaacaatcgaaagattctgcgatttaaatcaaatttcttttcaatgcctgatttttttgtaacaaaattacaaattttgtactataataacacccgcttcccactttcagacggcataccttttaaaatatagtggattaacaaaaatcaggacaaggcgacgaagccgcagacagtacagataatacggaaccgattcacttggtgcttcagcaccttagagaatcgttctctttgagctaaggcgaggcaacgccgtactggtttttgttaatccactatacttaccgtctgaatacccgatacaaaaatcagaaacgcacaaacaaatccccaataccccccccgttccgacaggagaccgaccgtgaacactactcctatccactccaaactcgccgaaatcaccgggcgcattattgaacgcagccgtccgacgcgtgaaaaatatctggcgaagatccgcagtgccaaacaaatgggacgcttagagcgcaaccagctcggctgcagcaacttggcacacggctatgctgccatgcctaaaagtatcaaaatcgaaatgcttcaggaaaccgtccccaacttaggcatcatcaccgcctacaacgacatggtttccgcacaccagccgtttaaagacttccctgaccaaatcaaagacgaagcgcagaaaaacggcgcgaccgcccaagtcgccggcggcacgcccgccatgtgcgacggcatcacgcaaggctacgccggcatggaattgtcgctgttctcccgcgacgtgattgccatgagtaccgccatcgggctgtcgcatcaaatgtttgacggcagcctgtttatgggcgtatgcgacaaaatcgttccaggtttgatgataggcgcgctttcgttcggtcatattccgggtatcttcgtccccgcaggcccgatgtccagcggtatcggcaacaaagaaaaagcccgcacccgccagcttttcgccgaaggcaaggtcggacgcaacgaacttttgaaaagcgaaatgggttcttaccacagcccgggcacctgcactttctacggcacggcaaactccaaccaaatgatgatggaaatgatgggcgtgcacctgcctgccgccgccttcgtccacccttacaccgacctgcgcgaagcgctgacccgctacgccgccggacacctcgcgcgcggcatcaaaaacggcacgattaaacctttgggcgaaatgttgaccgaaaaatcctttatcaacgccttgattggcctgatggcaaccggcggttcgaccaaccacaccatgcacctcgtcgctatggcgcgtgcggccggcgtgattttgaactgggacgacttcgacgaaatttcctccatcatcccgctgctcatccgcgtttatccgaacggcaaggccgacgtgaatcactttaccgcagcgggcggactgcctttcgttatccgcgaattgctgaatgcaggcctgttgcacgacgatgtcgataccgtcgtcggacacggtatgcgccactacaccaaagagcctttccttatcgacggcaaactcgaatggcgcgaagcccccgaaaccagcggcaacgacgacatcctgcgcaaagctgacaacccgttctcccccgacggcggtctgcgcctgatgaaaggcaacatcggacgcggcgtgattaaagtgtccgccgtgcgcgaaggctgccgcattattgaagcgcctgccatcgtgttcaacgaccaacgcgaagtgttggctgcgtttgaacgcggcgagttggaacgcgattttgtgtgcgtcgtccgctaccaaggcccgcgtgccaacggtatgcccgaattgcacaaactgaccccgcctttgggcatcctgcaagaccgcggcttcaaagtggcgctgctgaccgacggccgtatgtccggcgcgtccggcaaagttccagcctccatccacatgacacccgaagccctgatgggcggcaacatcgccaaaatccgtaccggcgacctgatccgcttcgactccgttagcggcgaactcaacgtcctgattaacgaaaccgaatggaatgcccgcgaagtcgaaagcatcgacttgggcgcgaaccaacaaggctgcggccgcgaactcttcgccaacttccgcagcatgaccagcagcgcggaaaccggtgccatgagtttcggcggcgaatttgcctgatgcgcgtttcagacggccttttcagaccgaaggccgtctgaaaaattattcaagcgttttaagatagacgtaggttggattctcgaatccgacacagccgtccaagatgtcggtttcttgaatccgacctacaacctgtcccatcttaataaaataccccattccacccggagaaccgaaatgtccaaactgaccccccgcgaaattttgaccgccggcgcagttgtgccggtaatggcgattgacgacttaagcaccgccatcgatttgtcccacgcccttgtcgaaggcggcatccctaccctcgaaatcaccctgcgcacccctgtcggcctcgatgccatccgcctgattgccaaagaagtgcccaacgccatcgtcggcgcaggtacggtaaccaatcccgaacagctcaaagccgtcgaagacgcaggcgcggttttcgccatcagcccggggctgcatgaatccctcgccaaagccggccacaacagcggcatccccctgattcccggtgttgccaccccgggcgaaatccaactggctttggaacacggcatcgacaccctcaaactcttccccgccgaagtcgtcggcggcaaagccatgctcaaagccctgtacggcccttacgccgatgttcgcttctgcccgacaggcggcatcagcctcgccaccgcgcccgagtacttggcactgcccaacgtcctgtgcgtcggcggctcttggctgacaccgaaagaagccgtgaaaaacaaagactgggacaccatcacccgcctcgccaaagaagcggcggcgttgaaacccaaagcctgattcgcatcgtaaaaatgccgtctgaaaaacctttcccgtttcagacggcattttgccgattgagggcacagtcggcatacacggcagcactgatcagacataccgcccctaaaatgcccatccgccttccgcataataaaaataacgttcagttcattcgacagcagccggacagcccatactacgcggctgaaaaaatgccgtctgaaacgcattcagacggcatccacttaaaaaaaacaactgattcaacgccgattaatccgcttccaaaaccactttcatcacttggttttcggcggcgtgtttgaacacgtcgtaggctttttccaattcactgaatttgaaatgatgggtcagcattttggtgtaatcgacggagctgctggaaatcgccttcatcagcatttcggtggtattggcgtttaccagaccggtagtgatggcaagctttttaatccagagtttttccagtttgaaatcaacggattgaccatgtacaccaaccacagcgatatggccgccgggtttcacaatgtcttggcacatattccatgtagcagggataccgacggcttcgatggcgcaatccacgccgtcttcgccgacgatggcaaagacttgtttggatacttcgccggaagcagggttaatggtatgggtcgcacccaattctttcgccagtttcaaacggttttcgtccatatcgcaaacgatgatggcggcgggactgtacagttgggcggtcaacagggcggacataccgacagggcctgccccagcgatgaatacggtgtcgccgggtttgacatcgccgtattgcacgccgatttcgtgggcggtcggcaaagcgtcgctcaacaacagggcgatttcttcgttgacattatcgggcagcggaacgaggctgttgtcggcataaggcgtacggacgtattcggcctgagtaccgtcaatcatgtaacccaaaatccaaccgccgttacggcagtgtgaatagagttgggttttgcagttgtcgcaagtgcaacatttgctgacgcatgaaataatgactttatcgccgactttgatgttttttacagcctcgccgacttcttctacaataccgatgccctcatgaccgagaatacggccgtcggcaacttcggggtttttgcctttccaaatacccaaatcggtaccgcaaatcgtggttttgacgattttcaccaccgcatcggtcggatcgataatctgcggacggggtttttcttcaaaacggatgtcgtttgcgccgtgataaaccattgctttcatgctgatactccttgcttgttgataaataatttcaataccgcaataaagtttctttatatgagttatatgcccctacaaaaaataagtcaataagaattattttcacaatgttatacaataacataccgttttaaatataaataaaaccaccgattgatattaatgaacacacccatccccttctccgarcggctcatccgctggcaaaaacaacacggtcgccaccacctcccttggcaggtcaaaaacccttattgcgtctggctttccgaaatcatgctccagcaaacgcaagtcgccaccgtgttggactactatccgcgcttcttagaaaaattcccgaccgttcagacgcttgccgccgcgccgcaagacgaagtgttgtcgttgtgggcgggcttgggctattacagccgcgcgcgcaacctgcacaaagccgcgcaacaagtcgtcaggcaattcggcggcacgtttccgtcggagcgcaaagacttggaaaccctctgcggcgtaggcagaagcaccgccgccgccatttgcgccttctccttcaaccgccgcgaaaccattttggacggcaacgtcaaacgcgtactctgccgcgtgttcgcccgcgacggcaatccgcaggacaaaaaatttgaaaactcgctctggacacttgccgaaagcctgctgccgtctgaaaacgccgatatgcctgcctatacacaaggtttgatggatttgggcgcgaccgtgtgcaaacggacgaaacccttgtgccaccaatgcccgatggcggacatctgcgaagcgaaaaagcaaaaccgcaccgccgagctgccgcgcaaaaaaaccgccgccgaagtaccgaccctgccgctttactggctgattgtccgcaaccgggacggcgcgattttgctggaaaaacgccccgccaaaggcatttggggcgggctgtattgcgtgccgtgttttgaaagtttgaacgggctttccgactttgccgccaaattctccctgaccatggcagatatggacgaacaaaccgccctgacccaccgcctgacgcaccggctgctattgattacgccctttgaagcacaaatgccgtctgaaagcccttcagacggcatttggataaagccggcgcatttgaaagattacggtttgcccaagcctttggaaatttatttaaacggtaataggttagaataaacaaaataaacccattgaactgttgtttgcaggtatcgcagcaagaacaaccgatgaatttgggtcgtattttaggcggcgggataatgttcaaatgggacatttggaacggaagaagtcggcaatttaaaaaggatttaaaaagcaaagaaggtcaaaaacatgaacacaaacttaaatgacaaagacaaagccatggataccgcaatcaggtttcagaaaaggatgaggattccgaaatttttctttttaattctcggaatcacaatggttttggcatttatccaagacgtgataacgggttctaattttctgcaaataacaattaatgtaaaattttcgtaaaaatttatcggcttttaaaacaaaattgactaaaatagtcgcgagtttttactgcaataaaggagattgcaatgaatatgaaaaccttattagcactagcggttagtgcagtatgttcagttggtgttgcgcaagcacacgagcataatacgatacctaaaggtgcttctattgaagtgaaagtgcaacaacttgatccagtaaacggtaacaaagatgtgggtacagtgactattactgaatctaactatggtcttgtgtttacccctgatttacaaggattaagcgaaggcttacatggtttccacatccatgaaaacccaagctgtgagccaaaagaaaaagaaggtaaattgacagctggtttaggcgcaggcggtcactgggatcctaaaggtgcaaaacaacatggttacccatggcaagatgatgcacacttaggtgatttacctgcattaactgtattgcatgatggcacagcaacaaatcctgttttagcaccacgtcttaaacatttagatgatgttcgcggtcactctattatgatccacacgggtggtgataatcactccgatcatccagctccacttggcggtggcggcccacgtatggcatgtggcgtgattaaataattcgattgttcgaaacgaaaagtgcggtgaattttgaccgcacttttttgctagatatttagcattgagacctttgcaataacataggttactaaaattttatgctcaatctcattttcaaaatgcaaaacttttctgatttttcctactttttgctcaatattaggaaggttttaggcaattgaaaattttttggcgcatttttatgcgtcaaatttcgttaacagactatttttgcaaaggtttcaattcataagtttcccgaaattccaacataaccgaaacctgacaataaccgtagcaactgaaccgtcattcccgcgaaagcgggaatctagaccttagaacaacagcaatattcaaagattatctgaaagtccgagattctagattcccgctttcgcgggaatgacgaaaagagacctttgcaaaattccttttccccgacagccgaaaccccaacacaggttttcggctgttttcgccccaaataccgcctaattctacccaaatatccccttaatcctccccggatacccgataatcaggcatccgtgctgccttttaggcggcagcgggcgcacttagcctgttggcggctttcaacaggttcaaacacatcgccttcaggtggctttgcgcactcactttaaccagtccgaaataggctgcccgggcgtagcggaatttacggtgcagcgtaccgaagctctgttcaaccacataacgggtcttcgacaaatatcggttgcgtttggtttgcacttccgtcagcggacggttgcggtgggctttgcgcataatgccgtccagcaactgatgttcttccagatgttgccggttttccgcactgtcgtagcctttgtcggcatagacggtcgtacctttgggcagtccttccaacaacggcgacaggtgtttgcactcatgggcattggcgggggtaatgtgcagtttctcgatatagccttctgcatcggtacgggtatgttgtttgtaaccgagtttgtagaggccgtttttctttatccaacgggcatcgctgtccttactcggtgtggtttgaccgctgatttgtccttcttcgtcaacttctatggcctgacgctgtttgctgccggcggtctgaataatggtggcgtcaacgacggcagcggatgctttctctatttttaaacctttttcggtcagttggcggttaatcagttccaacagttcagacagggtattgtcttgcgccagccggttgcggtagcggcataaggtgctgtaatcggggatgctcagttcgtcaaaacggcaaaacaggttgaaatcgatgcgggtaatgaggctgtgttcgagttcgggatcggagaggctgtgccattgtccgagcaggacggctttgaacatggacagcaggggataggcaggacggccgcggtggtctctaaggtaacgggttttttgacggttcaggtattgttcgatcagctgccaatcaatcacccggtccaacttcaatagcgggaagcggtcgatgtgtttggcaatcatggcttgggcggtttgctggaagaaggtgctcttgagaaatcccctaaatgtcttggtgggaatttaggggattttggggaattttgcaaaggtctctagatgagtgaaaaagaagtgcaggctgcctaaaaagacagaaaaagtctttccggcagcctgcactttggtttcatttcagtcagtaaacccagtaaacgacggtctgaaaacgcagaacgttacgaaaaaagcagcctacacgcccatcccccgccttctacccgttctgtaaatcatacagatagcggtaatatccgttcggcttcgccagcaattcctgctgtgttcccgcttccacaatcctgcctttatccatggcaatgatccggtgtgccgttttaacagtggacagacggtgggcgataatcagcaccgtccggttggcgcaaatggcctgcatgttctgcataatcgctcgttcactttcataatccagcgcgctggtggcttcatcaaaaatcagaatgcgcggattggtgattaacgcgcgggcaatcgcaatacgctgccgctgtccgcccgacaagccggccccttgttcgcccaccacggtgccgtagccttccggcagctccataataaactcgtgtgcgcccgccagtttggctgcttcgataatgcgttccagcggcatacccgtatccgtcagcgcgatattgtcgcgtatgctgcggttgagcagcacattctcctgcaagaccacgccgacctgccgccgcagccaggcaggagcggccaaagccaaatcgttgccgtccaccaacacccgtccctgctccggtacatacagacgctgcaccaatttggtgagtgtggatttgcccgaccccgaacgtcccacaatccccagcacttcccccgcccgaatccgcaggttcaaatcctgcaaaatcagcctgccgtccgccttatagcggaaatcgacatgttcgaacgtaatctccccccggatatcgggcaaagccaaatgcgaagacgcattctcggtcggcgcattcagaatatcccccaaacgcgccaccgaaatccccacctgctggaaatcctgccacaactgcgccaaacggataacaggcgccgccacctgtcccgagagcatattaaacgcaatcagctgccccaccgtcagcttgctctcaattaccagccgtgcgccaatccacaacgtcgccaccgtcaccagcttctgaatcagctgcaccccctgctggccgaccaccgccaacttcgttacccgaaatcccgaagccacataagccgccaactgattgtcccaacgctgcgtcatctgcggctccaccgccatcgcctttaccgtacccaccgcagtgatgctttctactaaaaacgactggttgtctgcattgcgcgcgaacttatcgttcagacgcgtccgcagtatcggactgataaatgccgaccaaaacgcataggcaggcaacgaagccaataccacccaagtcagagtggagctgtaataccacatcaccgccagaaagataaacgaaaacgccaaatccaacaccgaagtcagcgcctgaccggtcaagaaattgcgaatctgctccaattcccgcacccgagccaccgtatcacccactcgtctgtgctcgaaataggataaaggcagggaaagcagatgccggaacaaacgcgcgcccaattccacatcaatacgtgaagtcgtatgtgcaaacagatacgtccgcaaaccgcccaacacaatctcaaacagcgacaccaccaacaaagccaccgacaccacatccaaagtagagaatccccgatgtaccagcaccttgtccatcaccacttggaaaaacagaggcgtaatcagcgcaaacagctgcaacaccaccgacaccaccaatacttcaaaaaacaaccggcggtatttgattaccgccggaataaaccaggtaaagtcaaactttgccaaactgcccaataccgaagcgcgggaagcaaccaatatcagtttgcccgaatatctgttagaaaattcggcaaaagacaataccgcagacttattcgtaaccaaatcctgtatcaaaaattgggcatgctcaccctcaccgtctgttttggccaaaatgaaatggttgccgtcatcacaccataccaatgcgggtaaagtcgccatagccaaacgtttaataggctggcggactacctttgccttcaatcccaaagatttggcggctaacagccattgcgtttcatttaaatcgctctgtgcggaagtacaaaattcatgctgtatatcggcaggattggcggcaatgccgtggtaatgggcgaggatgatgagggcggaaagggcggggagcggtgcggatacgatagacataaataaaatatagttagattggatgtggataacggctggctggaaaaggaatatattaagtagaaagaaatatataaataaaacagcagaacgcattgtaaggatatatatgggaattgtaaagagaaagtatggaaaagttctcgtttcaggaaggtaaaacggcttaggaatcgagttagatgaggatgcctcgcacctctcgtgcctcctgcataccgttaaggcacagggttaaggtgcaggctgctccgaactctgttgcggtcgggtaatgttattttttgtgtttcaggcagcctgaaatatctgtatatttttgttttaaatagattttaaagattgataactgttcttgacgatttttcaagaaaggagtaaatttcaagaaaggagtaaagtgacttattatcaatgacaagcaacgcgcgaagtgacaaggaaaactatctacttaaattctaaggaggcttcgaatatcataaaccaatcagaaacatagagataaaaattatgtacaaatataatcctcttatacaatttattgcacagttgattatgtcttatggagcaagcgtagggtgggcacttgctgccccacgcgtttcatatttcaaggcagcctgaaaccgtgtgggcataaatgcctaccctacatcccaaaaaacaagcgcagcctgcgtgtgtagggtgcgaactttcggcaggtagacacgcagttttatattttcaagctgagggatgcttaagaaaagtacaaaacattaaaaaataaggggctgtactagattagccctaaatccacaccaatcccgcaagatttttagctgtcgggacggtgtgccgaagttaaatcgaaattcgcattctttcaagaacagcgggaaagatttgcgatcaattccgttctatttgcgcaagacgcgttttgcctgattccaaaagttctcaatgccgtttatgtggttctgacggtcagcaaattccttggaatggttgatgcggtaatggataaaaccgcttacgtccaacttgtcgtaactgctcaggctgtcggtataaacaatgctgtccggcatgattttctgtttgataacaggcattaaagtatcggacttggcattatctacgacaacggtatagacccgtccgttacgtttcagaatgccgaagacaaccacttttcctgccgcaccgcgaccacgtttgcctttacgccgtccgccgaaatagctttcgtccaactcgacagagccctcgaaaacctcattggcagccaaggccagataatggctgatgaccatacggattttgcggtagaacaggactgccgaattgggatggatacccaaaatatcggcagcagaacgggcggtaacttcgagtacaaaaaaacggagcagctctttctgtacttttttctttaatttgcagtgtgttatcttcatatttcgggggtaacatatctgctaatctagtacagcctcaaacaaaaaagagaaattttaatttcgctaaatcgcataaagattaatcaagagtatcattaaatgatatgagtgagcatctataatgccaagaagagttgttaagacataacgattattgaaatagattgtaaaatagatacttagatagtctgaaaaacggatttgtgaaactttttattacgcgccatcatttgaaaatgaaacttaaaaaacacttatcataataaatattttctttacgttgtttgctaataaactcagtgcaatatcagcgcaatattttatggaaattttatggataacaaaaaagaatttattaataatttaacaaataggtatatgtggatctatccattggtcttaaatattctatttctacctttttaccagtcctaccaatctttttttattgcgcttggttgtttgtttgcactggttagaaaaatgcaaagcttagattttaaattacaaaatcatattgtattgttaaatataaaaagtgcttgggcagataaaaaagtatttttgattaggatagtagtgtcatggttggcagtaatggaaatatggatgtgttttatttcggaatcatcaacgtgggtatgcggtgctttttgtttaaatagtgaaatattggaaaaaatttttcgtggctttggttattctggtagtttatattttttatttatattgatgattgatctcaataagttaagagagagtatttgaatttcattttttgtttgacttaaactcaaggagagtaacaatgattggtagtggtgatactaaacaatgcaaaaaattttctgcgtgtgatggaaaataccacgtctacgatcccctcgccctagacttggacggcgacggcatagaaacagtcaccgccaaaggcttttcaggcagcctgaagactgagagagtgaatacgatgagtatacactctatgccactaaattgatattcactaaatcataccagctatattttatttaatgagacatatgaaaaataaaaattatttactagtatttatagttttacatatagccttgatagtaattaatatagtgtttggttattttgtttttctatttgatttttttgcgtttttgttttttgcaaacgtctttcttgctgtaaatttattatttttagaaaaaaacataaaaaacaaattattgtttttattgccgatttctattattatatggatggtaattcatattagtatgataaatataaaattttataaatttgagcatcaaataaaggaacaaaatatatcctcgattactggggtgataaaaccacatgatagttataattatgtttatgactcaaatggatatgctaaattaaaagataatcatagatatggtagggtaattagagaaacaccttatattgatgtagttgcatctgatgttaaaaataaatccataagattaagcttggtttgtggtattcattcatatgctccatgtgccaattttataaaatttgcaaaaaaacctgttaaaatttatttttataatcaacctcaaggagattttatagataatgtaatatttgaaattaatgatggaaacaaaagtttgtacttgttagataagtataaaacattttttcttattgaaaacagtgtttgtatcgtattaattattttatatttaaaatttaatttgcttttatataggacttacttcaatgagttggaatagttttggtaattttatgagcgcacgctcatccgcgttagcagaatttggaaatatggttgctaatttagtttctgcaaaaaatgagaaagatatctcgaaacgtaatgaatattacaaacaagctggttatagtgcattattagcatttggtaatttggctagtaatattgcaccaggtagtacgtcatcgcatattgtaaacggaacaaatgcctctgtgattgcaagccgtctctctggaaatatatcttcagctattcaggagcataaagatggtaaagttaatatcaaccgttttcaaaatattttagcggatttatattcattgggagggttaggaagtacattaatagagaagaatggaaatatgcagagttgggggattccattagcaattgctggagatataattgcagcaacggctattgccacaggagatactggtacgatatctacagaggaattttataattttgacaactggaaaggttttgggtatgagctatttgaagactggtctcgttgggtatacgactggctgcccgacggctggaatctgtggaaagaattggacagaaaccgttcaggccaataccacatctacgaccccctcgccctagacctagacggcgacggcatagaaacagtcgccgccaaaggcttttcaggcagcctcttcgaccataacggcaacggcatccgcaccgccactggctgggtttctgccgatgacggtttactcgtccgcgatttgaacggcaacggcatcatcgacaacggcgcggaactcttcggcgacaacaccaaactggcagacggttcttttgccaaacacggctatgcagctttggccgaattggattcaaacggcgacaacatcatcaacgcggcagacgccgcattccaatccctgcgtgtatggcaggatctcaaccaggacggcatttcccaagctaatgaattgcgtacccttgaagaattgggtatccaatctttggatctcgcctataaagatgtaaataaaaatctcggtaacggtaacactttggctcagcaaggcagctataccaaaacagacggtacaaccgcaaaaatgggggatttacttttagcagccgacaatctgcacagccgcttcacgaacaaaatgctatccattagccatgttcgggaaaacacgatttccccgtttgttttaggctgtctaaacaaataaccataaatgtatatcattatttaaaataaataaaagtatttaactattattgacgaaattttagagaaagagtagactgtcgattaaatgacaaacaatagtgagaaaggaaatatttactatccgagcacagagcatattttaggtagcctgtaactgttcctgctggcggaagaggatgaaggttgacttacccgagaataaatgtcctgttgtgtgatatggatgccatgccgcgaagcaattgatgcaatcacggcagtcctacttgaatgaaacctgtcgttgcagaatttgaaaacgctatttttaagaaaggataaagggagaaagaatttttggtttttaagctgcatgaaaccgtgttggaataaatgcacacctacgataattaataattttcgttttttattctacaagctatttatatatgattgctaaaagtttattttttagatgccaaaaaatatattttatatacttcatattgtttatatgtctttatttgaatatatcttacgatggggaaatatttatatattttataataaattttactcatttgctaatatgtcatggaatattacttgtattttgtagaatttttccatatgaaaatattccatttactatttttctgaactttattagtttatttttaatatttttacctcttatatttaccataagagagctaattgattcatattatattgagtcgataattaatttattcttaattttaattcctcacgttatttttttaatttacttgaaaggaaagcagatatgacatctgcaaattttaatattaacggttttggagatgtgaaattaacaccctattcaccactcttgggatataaagcttgggattcatttattggttctattcaatccttatctgatttaatctataatgtggataacaatagaaataaaatggaaattactgttaataatgctattcaagctgcagatagctttttaagcagtaattggaagagataacaaaataacaaaataacaaaataacaaatactgcttctttacttgcatccttcgataacattttttaaatttaagaaatgtatctcgagatatacgagaaacaggaaaatttaaacctaatgatattcaacaagcaattggtgatatattcattgctgctggtgatggattacaatatataaaacaacaaacagaggcgatggctcaaagcaaattcttaccaactaaattaaaaactggtttaaatgatgtccttaattctagaatgctaaaatcctctactgttttacagcatgaattgaattaaataaggattatggaaacgagaggcttggcgaatctataatgaatatagatgattttacaccaagtaagatagcaaacttttttgcggatcctgatacatacagcaatgtattagaagaagtatctaggtttatatattccttagttcctgatgatgcaaacccttggaaagggggcgaagattatattggacgagggataagtgaatggggagagttactggaaaaatggtataaacaagattttctcccttatcttgaaaagaatgggaccaatttccgaaatttgaagattggctgcctgaattccctgaatgggcaagagagtggttgaaattagctctcaaacgttcaggcaaatataacgtttacgatcccctcgccctagatttggacggcgacggtatagaaaccgttgccaccaaaggcttttcaggcagcttatttgatcacaccaacaacggcatccgcaccgccacgggctggattgctgcatatgacggttttcctgtgcgcaaattaaacagtaacgggggcattattagcacgacagataccatattccaatctttgcatacatggcttgatcatcaaccaagatgatatttcccaagcacagcatgatgcatgccattgaaaaatatagaaaattaattgaaagcttaaatggatattgaaatgaatgatcacatagtacaaattataagaaggttcgggctaggtaggatatttttttattcgtatagcaaatcatctataataattttttcttcgtatgttgtttattatataatttacaattatcaatttaattacctttcgcttttaatttatttattaccaatattgtgcagtatatatatgtttatattttttttagggaaaactaaggatacattaacgacagagcgaagaaaaaaattttttaattctatttttccacttagaattctaatgataataggttctgagaaaaagaggttaggcatcggtagtttttatttgctaaacctactatggattatttggtgtcttatgattcatagagaacaagtcccattaaataacttaaccctcctattatccttcatattttcattattttttttattatgtgattttgttttattattgaatgtttatgtttatttttttaaattaagagaggcttaatatggttaatcaaatcaaatctgataataattcagtttctattgaatttatataagattttataactgcaagtacggatgtaattaatctgagttacgaaaattttcgtaaaaatttttatacacaaatgtcaactgattctaccaattatgcagccaaacatgaaagtttaggaaaatcggtacaacgtgaattacaaaaaacacaaagtcagttgagacaagttgtaagaaaaatgcagagtaaatataatataaataataaagcacgagtagcagaaatatctttgttaaggcaaatgcaaagccaattttctcgaaaatatgtaaacaaaaatcttggtaacagcaacactttggctcaacaaggcagctacaccaaaaaagacggcacaaccgcgcaagcaggcgatttgctgttggctgctgacaacctgcacagccgcctcacggacaaaatgctatccattagccatgttcgggaaaacacgatttccccgtttgttttaggctgtctaaaacaaataaccataaatgcatatcattatttaaaataaataaaagtatttaactatttttgacaaaattttagaaatagagctagagttttagttaagtagaaattgatagtgcttcaagggaagtattctctatgtttgcattaaagggggtctgataaagctattattcattactatggacttttatttcattattttcaggcggaaatctcatagccgttttgaatttttctcttccttattaattatacaaataattagtatattctgatatggattttttggaaatttttattatgtctgcatttagaaaaatattattaataatatcttgcctattgattgctagctgcagttttgttgaaactattttttatatggctattagcccagaacctgttgtggtagactttcctcttggtaaaaaaacaaaaagatctattgaactcaaacagaaaattggtaaaccttatgcaatatcgttaggaactaattttatacattatgatccaaaacagggggagaggtggattgatgataagttaaactatccatataatatatcggttaaaatatttaaagtggaagaagatggtaaaaaacttattatagatgagttgcttacagagagaagtagaaaattaggaggcggagtatttggagctgggggaaaatacagtatgcatatttatgatttttatttgccggaaggggaatatttatttgagatttctgataatagtgaatatattccactttacgatgaaataaataattctataagaatagtagttaatgcacgaattcagtaaatttttctagaaatgtggggttacttatggctgattattatgcgataactgtaaaatttgcgaagcagggtacgccactgaaacaagagggggtgtatccaagacgggtacgtttgggttgaactgtattcggctagagataaaaaaatcggggctgtactagattagccctaaattccacaccaatcccgcaggattttaagctgttgagacggtgtgccgaagttaaatcgaaattcgcattctttcaagaacagcgggaaagatttacgatcgattccgttgtattttcgcaagacgcgttttgcctgattccaaaaattctcaatgccgttaatgtggttctgacggtctgcaaattccttggaatggttgatgcggtaatggataaaaccgctcacgtccaacttgtcgcagctgctcagactatcggtataaacaatactgtccggcatgattttctttttgatgacagggagtaacgtttcagacttggcattatctacgacaacggtatagccccgtccgttgcgtttcagaatgccgaagacaaccacttttcctgccgcaccgcgaccacgtctgcctttacgccgtccgccgaaatcgctttcgtccggctcgacagggccctcaaaaacctcatcggcagccaaggccaaatgatggttgataaccgtgcggattttacggtagaacagtactgccgaattgggatggatacccaaaatatcggcggcagaacgggcggtaacttccagcacaaaaaaacggagcagttctttctgtacttttttctttaatttgcagtgcgttatcttcatatttcgagggtaacatatctgctaatctagtacagccccaaaaatataccaaaaacagcaaaacaaattgtaaggataggtataggctttgtaaaggtaaattgtgaaaaaagcagttttttaaacgaatgaaacggcttcgggctgaaatatatgctgatgccctgtccttcccgtatatcttgtgtgttgtcaaagtgcaggctgctttgaaatcggtattgccatctatgaaccaccactttgttttatttcagcgggcttgagatgtgtataagaatattgttttgaataaatttaaaaaaatgataatcgttattgacgatttttaaaggaaagcgtagagtgccaattctatgaagcaatacggtaagtaacaatgaaaatatctactgcttgggtatagagcatatttcacaacccgtaactattcttgcggaaacagagaaaaaagtttctcttctatcttggataaatatatttaccctcagtttagttaagtattggaatttatacctaagtagtaaaagttagtaaattatttttaactaaagagttagtatctaccataatatattctttaactaatttctaggcttgaaattatgagaccatatgctactactatttatcaactttttattttgtttattgggagtgtttttactatgacctcatgtgaacctgtgaatgaaaagacagatcaaaaagcagtaagtgcgcaacaggctaaagaacaaaccagtttcaacaatcccgagccaatgacaggatttgaacatacggttacatttgattttcagggcaccaaaatggttatcccctatggctatcttgcacggtatacgcaagacaatgccacaaaatggctttccgacacgccagggcaggatgcttactccattaatttgatagagattagcgtctattacaaaaaaaccgaccaaggctgggtgctcgaaccatacaaccagcaaaacaaagcgcactttatccaatttctacgcgacggtttggatagcgtggacgatattgttatccgaaaagatgcgtgtagtttaagcacgactatgggagaaagattgcttacttacggggttaaaaaaatgccatctgcctatcctgaatacgaggcttatgaagataaaagacatattcctgaaaatccatattttcatgaattttactatattaaaaaaggagaaaatccggcgattattactcatcggaactatcataggtatggagagaacgattacagcactagcgtaggttcctgtattaacggtttcacggtacggtattacccgtttattcgggaaaagcagcagctcacacagcaggagttggtaggttatcaccaacaagtagagcaattggtacagagttttgtaaacaatccaagtaaaaaataatggggctgtcctagataactaggataaactcgattttactaattgttttaaaatggaacaagaacttttatctcactgttgttaaaacgccattcgcactcctttaaatacagctcaaaatgcgctttgggaatgccgttaaacttgcgtaaatgacgttttgcctggttccaaaagttctcaattccattaatatggttttgtcgttcagcaaaatgtgtgctgtgattgatacgaaaacgaagtttcagcgaagctaaaatggctaaattcgcgcacatctaatacatcatagctacgataacaatccgtataaataatgctgtcaggtttcacttgttcacggataataggaaataaagtagcggtttgagtattcggtactgtaaccgtataaaccttaccatttcgcttcaaaagaccgaatacggcgactttaccggcagcaccgcgaccgcgtttgcctttgcgttgtccgccaaaataactttcatctgcttctacttcgccatcaaacatttccaaatgcggactgttttgataaataagtaatcgtaaacgatgaaaataataggctgcggtatttttattaacgcctactaactctgctgccgttcttgcagttacacctgtgacaaatagctcaatgagtttattttgtttatactggcttagacgactttttctcatagggataattctaacttaatttgaatttccctagttatctaggacagcccctattctttaactaatttctaagcttgaaattatgagaccatatgctactaccatttatcaactttttattttgtttattgggagtgtttttactatgacctcatgtgaacctgttaatgaacaaaccagtttcaacaatcccgagccaatgacaggatttgaacatacggttacatttgattttcagggcaccaaaatggttatcccctatggctatcttgcacggtatacgcaagacaatgccacaaaatggctttccgacacgccagggcaggatgcttactccattaatttgatagagattagcgtctattacaaaaaaaccgaccaaggctgggtgctcgaaccatacaaccagcagaacaaagcacactttattcaatttctacgcgatggtttggatagcgtggacgatattgttatccgaaaagatgcgtgtagtttaagcacgactatgggagaaagattgcttacttacggggttaaaaaaatgccatctgcctatcctgaatacgaggcttatgaagataaaagacatattcctgaaaatccatattttcatgaattttactatattaaaaaaggagaaaatccggcgattattactcattggaataatcgagtaaaccaggctgaagaagataattatagcactagcgtaggttcctgtattaacggtttcacggtacagtattacccgtttattcgggaaaagcagcagctcacacagcaggagttggtaggttatcaccaacaagtagagcaattggtacagagttttgtaaacaattcaagtaaaaaataatttaaaggatcttattatgaatgagggtgaagttgttttaacaccagaacaaatccaaaccttgcgtggttatgcttcccgtggcgatacctatggcggttggcgttatttggctaatttgggtgaccgttatgcggatgatgctgctgcaattgtcggtaaggatgcaaacttaaatggtttgaatttatggatgaaaaaaggtgtggaaaacctatgggatgatacggtcggtaaaaagacccgtttagagaaatttgatcgggttgcactgcaacatttcaggcaatatgcgcgtctaattaatcaaaataatggtagattacccaatactagtgaaattgagagaagttactataaagccgttaccgataatggcgtttcttccagtgcagctattgatttagttattaatcgttcacttccggatatggcggatggttattgggcattaggtttggggatagaagccgaacgtatccacaatgagcaagcagtaaataatccgaacggtagcgaaagggataatagaaagcagttaatatctgctttagataaaggatttgatggatcttttaaagagaagcattttacttttttacaatctgtgatgatggatgtaacaaagttaggtgttgaatatacaatagatggttggcaaaaaattggaggttggggtaatgggataatcaatgatttatataaaagtgttgtaaaaagagagtggactggaatatttgagatcgttaataataacatcaagcaaggaaatgaagcttttaaaaatgaaatcaatagcttggttcatgatatgaaagctgctggcaaggaatttggagatgacttaaatacacagtggaataatctcactcaggctgccgaaataatctataatgacatagtagacaatactagtcaaggaatagaaaaaggtgtcaaagccattaaagaattgtctgaaaaaatgaaaaatgctgcttccgatttggctgacggttcagcagagaaagctaaacaagtagtggaagatttggctcaagccgccaaagaagcatacgaaaatgccaaatccacagccgagaaggctgctcaagcagctcgagaattttttaagggcttgcccagttttaaagatctggccgaaaaatttagagatctgttcccaaatccggaaggctggatcgatgatggtcaccaatgtttagctccttgggttaaagaaactaaaaaacgcaatggcaaatatcatgtctacgacccccttgccctagacctagatggcgacggtatagaaaccgttgccaccaaaggctttgcaggcagcttatttgatcacaccaacaacggtatccgcaccgccaccggttgggtttctgccgatgacggtttactcgtccgcgatttgaacggcaacggcatcatcgacaacggtgcggaactcttcggcgacaacaccaaactggcagacggttcttttgccaaacacggctacgcggctttggccgaattggattcaaacggcgacaacatcatcaacgcggcagacgccgcattccaaaccctgcgtgtatggcaggatctcaatcaggacggcatttcccaagctaatgaattgcgtacccttgaagaattgggtatccaatctttggatctcgcctataaagatgtaaataaaaatctcggtaacggtaacactttggctcagcaaggcagctataccaaaacagacggtacaaccgcaaaaatgggggatttacttttagcagccgacaatctgcacagccgcttcaaagacaaagtggaactcactgccgaacaggcaaaagccgccaatcttgcgggcattggccgtctgcgcgatttgcgcgaagctgccgcattgtccggcgatttggccaatatgctgaaagcttattctgccgccgaaactaaagaagcacagttggcattgttagataatttgattcacaaatgggcggaaaccgattcgaactggggcaaaaaatcgccaatgcgactttcaaccgattggacgcaaacggctaatgaaggtattgcactgacaccatcccaagtagcacaactaaaaaagaacgctttagtttccctttctgataaagctaaagcagctattgacgccgcccgcgaccgcattgccgtgcttgatgcctacacggggcaggattccaacacactctattacatgagcgaggaagatgcgcttaatatcgtcaaagtaaccaacgatacatacgaccatctcgccaaaaacatctaccaaaacctgttgttccaaacccgtttgcagccatatttgaatcaaatcagtttcaaaatggaaaatgatacgttcactttggattttagtggtcttgttcaagcatttaaccatgtcaaagaaactaatccgcaaaaagcttttgtggatttggccgagatgcttgcatatggcgaacttcgttcttggtatgaaggccgaagactaatgaccgattatgtggaggaggcaaaaaaagcaggtaaatttgaagattaccagaaagtgttgggtcaggagaccgttgcattattagctaaaacatcgggtacgcaagcagatgatatcctgcaaaatgtaggctttggtcataataaaaatgtttctttatatggtaatgacggcaacgacactctaatcggcggcgccggtaatgactatttggagggcggcagcggttcggatacttatgtcttcggcgaaggcttcggtcaggatacggtctataattacgactacgctaccggacgcaaagacatcatccgctttaccgacggtattacagccgatatgctgacttttacccgagagggcaaccatcttcttatcaaggcaaaagacggcagtggacaagtgactgttcagtcctatttccagaacgatggctcaggtgcttaccgtatcgatgagattcatttcgataacggcaaagtactggatgttgccactgtcaaagaactggtacagcaatccaccgacggttcggacagattgtatgcctaccaatccggaaataccttaaatggcggattgggcgatgactatctgtacggtgccgacggggatgacctgctgaatggtgatgcaggcaacgacagtatctacagtggcaatggcaatgatacgctcgatggaggagaaggcaacgacgccctgtacggctataatggtaacgatgcactgaatggtggcgaaggcaatgatcatttgaacggcgaagacggtaacgacactctgatcggcggtgccggtaatgattacttggagggcggcagcggttcggatacttatgtcttcggcaaaggcttcggtcaggatacggtctataattacgactacgctaccggacgcaaagacatcatccgctttaccgacggtattacagccgatatgctgacttttacccgagagggcaaccatcttcttatcaaggcaaaagacggcagtggacaagtgactgttcagtactatttccagaacgatggctcaggagcttaccgtatcgacgagattcatttcgataacggcaaagtactggatgttgccactgtcaaagaactggtacagcaatccaccgacggttcggacagattgtatgcctaccaatccggaaataccttaaatggcggattgggcgatgactatctgtacggtgccgacggggatgacctgctgaatggtgatgcaggcaacgacagtatctacagtggcaatggcaatgatacgctcgatggaggagaaggcaacgacgccctgtacggctataatggtaacgatgcactgaatggtggcgaaggcaatgatcatttgaacggcgaagacggtaacgacactctaatcggcggtgcaggcaatgattacttggagggcggcagcggttcggatacttatgtcttcggcaaaggcttcggtcaggatgcggtctataattacgactacgctaccggacgcaaagacatcatccgctttaccgacggtattacagccgatatgctgacttttacccgagagggcaaccatcttcttatcaaggcaaaagacggcagtggacaagtgactgttcagtcctatttccagaacgatggctcaggtgcttaccgtatcgatgagattcatttcgataacggcaaagtactggatgttgccactgtcaaagaactggtacagcaatccaccgacggttcggacagattgtatgcctaccaatccggaaataccttaaatggcggattgggcgatgactatctgtacggtgccgacggggatgacctgctgaatggtgatgcaggcaacgacagtatctacagtggcaatggcaatgatacgctcaatggaggagaaggcaacgacgccctgtacggctataatggtaacgatgcactgaatggtggcgaaggcaatgatcatttgaacggcgaagatggcaacgacactctaatcggcggtgcaggcaatgattacttggagggcggcagcggttcggatacttatgtcttcggcaaaggcttcggtcaggatgcggtctataattacgactacgctaccggacgcaaagacatcatccgctttaccgacggtattacagccgatatgctgacttttacccgagagggcaaccatcttcttatcaaggcaaaagacggcagtggacaagtgactgttcagtcctatttccagaacgatggctcaggtgcttaccgtatcgatgagattcatttcgataacggcaaagtactggatgttgccactgtcaaagaactggtacagcaatccaccgacggttcggacagattgtatgcctaccaatccggaagtaccttaaatggcggattgggcgatgactatctgtacggtgccgacggggatgacctgctgaatggtgatgcaggcaacgacagtatctacagtggcaatggcaatgatacgctcgatggaggagaaggcaacgacgccctgtacggctataatggtaacgatgcactgaatggtggcgaaggcaatgatcatttgaacggcgaagacggtaacgacactctgatcggcggtgcaggcaatgattacttggagggcggcagcggttcggatacttatgtcttcggcgaaggcttcggtcaggatacggtctataattaccatgtggataaaaactctgacactatgcactttaaaggatttaaagcagcagatgttcattttatccgttccggaagtgatttggtgcttagcgcttctgaacaagacaacgtacgtatttccggatttttctatggtgaaaaccatcgtgtagatacatttgtctttgatgatgcagctatcagtaatccagattttgccaagtatattaatgctggcaataatttggtacagtctatgtctgtgttcggttctaatactgctgcgacaggaggaaatgtggatgccaatatacaatccgtacagcagccgttattggtaacgccatctgcataaggagcctaatcacattcatggcttaaactgaaaaacagcaatcaagtttattttgattgctgtttttcttaatattgggataagggtcgtattttaattaaccttaatcggtgcacttctagcaatatagtggattcacaaaaaccagtacagcgttgcctcgccttaccgtactatctgtactgtctgcggctttgtcgccttgtcctgatttttgttaatccactataattaatatgactttgcggccgttttgccattgcgtaataaaacgatggggaagtgatgataaaacgtgtgtgtaactatatcagacggcattgtttttctgtttgacggcctcaatccaaaattttgccgacgatttcgcccacgtctttcgacaatccttcctgcgcccgaatgcgctgcaatgcttgtttcaccaagtttttgcggtgcggctcgagcttgttgcagaggttgaacgcctgcactaagcgggcggcgacctgcgggttgaagcggtcgatttcgatgactttgtcggcgatgaagcggtagccgctgccgtcttctgcgtggaaatgcgggacgttgcggctgaagctgccgatgagcgaacgggctttgttggggttttcgaggctgaatttcggatgctgcaaggcggttcgaacctgttgcagggtgtcgctgcggcggcttgagccgacgagggcaaaatatttgtccatcaccagcgcgtcgtctgaaaacttgtcggcaaactgcgccagcaggcggttgcgcgtatcgctttcgttgccgttgacggcggacaggatgccccattcgtgggtcatgttttgcgccatttcgccgtatttttcggcaacggtttcgatgtgcgcggggtcggcgcgcaggacaaaggcgcggcagacgttgcgcagcgtgcgccagccggcggcttcggggctgtattcgtagctttggttttcctgcttcgccgcctgacggttcaattcgtgccatttcggcaggaagtggacggcaagcgtatccaacaaggcttcgcgcgcctgatggtagcgcagcgggtcgatgttttctgcgccgtcccacagctcggcttcggatggcacgcccaaaagcagggctttgaaggcgttgtctaagaggtcgtctgaaatgactttttcgacggcggcaagcagtttttcgtgtttcggcagctcaacgccgtctgaaagcgtggcaaggttggcggcgacggcgcggcggtagagcgtttgggcggcttcccagcgcgtgaaggcgtcgctgtcatgggcgagcaggagcagcaggtcgtcgtcgctgtacggatagttcagatgcaccggcgcgctgaacccgcgcagcagcgagggaacgacggcttcggttacgccttcgagcaggaaggtctgttcggcttcggtcagcagcaacacggcttcggtcgcgcgtttgccctgatagtcgaatgccaccgcttcgccgttgcggttcagcagcccgaccttgacgggaatcatcatcggctgtttatccgtcatatcgggcgtgggcggcacggtttgtttgacggtcaactcgaaaatattgtttttcagacgaccttccgcttccaaaacgggcgtgcccgcctggctgtaccacaaggcgaactggtcgagattgatgccgttcgcgtccgccatcgccgcgcggaaatcgtcgcaggtaacggcctgtccgtcgtggcgttggaaatagagcttcatgcctttctggaagccctcttcgccgagcagggtgtgatacatccgcactacttccgcgcctttttcataaacggtcatggtgtagaaattgttcatctcctcatagctggcggggcgcaccggatgggcggtcgggcctgcgtcttcggggaactggtgctggcgcagcaggcggatgttttcgatgcggcgcacggcgcggctggcgcggtcgccggaaaattcttggtcgcggaacacggtcagcccttccttcagcgaaagctggaaccagtcgcggcaggttacgcggttgcccgtccagttgtggaaatactcgtgtccgaccacggattcgatgccttcgaaatcggtatcggtggcggtgcggctgtcggcaaggacgaacttggtgttaaagatgttcaaacccttgttttccatcgcgcccatattgaaatcgcccacggcgacgaccatgaaaatatccaagtcgtattccaaaccgaagcgcgtttcgtcccatttcatcgcgtttttcaacgattccacggcaaagccgaccttgggcttgtccgcttcggtggtgtaaaactcgattttgacgtttctgccgctcatggtggtgaaatagtcttccgttaccgccaaatcgcccgcgaccaaagcaaacagatagctcggtttggaaaacgggtcttcccatttcacccaatggcggccgtctgaaaactcgccgccgtcgattttgttgccgttggaaagcaaaacgggatagcgttttttgtcggcgacgatggtggtggtgaacttggacatcacatccggacggtcgatgtaaaatgtgattttgcggaagccctccggctcgcactgggtaaacaaattgccgccggaagcatacagccccatcagcgatttgttttccgccggcaggatttcggtttccacttcgacggtgaagcgttcggacggcacgcccgcaatcgtcagcgtctctccttccaacacataatccgccgccgccccgttgattttgacggacaagagtttcgccgaaccgtccaacaccagcggctcccctaccctctgcggctcaaccgtcaaacgcgacttcacgacggtttgcggttcattaatatcaaaatgtaaatcggttttgagaatatggtaggcgggcgtttgatagtctttgagataatgcacggttttgctcatttttttctttcaatgttattttgtttgactggaaaaggcttcagacggcacgggcgcatcccgcgtatgccgtctgaagccgcagcggcggcacgggcgcgccgccggacaaccggtttgaattcaatctttattcccacgcgcggacaaactcttcccaatgcggcttttccccggcttgtgcggacaggtaattccgcatccgtttgatttccatttcgtattcgtccgcatccagcctgccgctgaccagacagaaacgcaggtacatcagataagtgtttgccgcgtcggtttcgcaataattgcggatttccttcagcctgcccgtatggaatgcctcccaaaccttgctgccgtccatacccagcttgcccggaaaaccgcacagtttcgccatatcgtccagcggcacgtttgccctcggctggtaaagcgcgagcaaatccatcaaatcgcagtggcgttggtgataacggctgatgtagttgttccacttgaaatcgcggctgtcgccgaaatcgccgtcgcccatatcccaatagcgcgcggcgttgatgccgtatatcagggagcggtaatgcagtacgggcagatcgaaaccgccgccgttccaactgaccagttgcggcgtatgtttttcaatcaattcgaaaaatttagcaatgaccacttcctcgccgtcatccatctcgccgatggtgccgacatgtactttatcctgcccccaacgcatgcagcacgaaatcgccacaacctgatgaagatgatgctgcataaaatcgccgcccgtctgagcacggcgtttttgctgggcaaacagcaccacttcatcgtcgggcagcgaggacggcagctcgtacaatgttcggataccctgcacatcgggtacggtttcaatatcgaaagccaaaatcgtggtcatgacagcaccttgtatttaaaacggatgcacctattgtgtcattaaaaggcggataaaaaaagaggcaaccccccacaggattgccccaatacctcaaatcagagatttacgcttcacaaacaatacaggctttcgcctgcggctttacccgcgtagctcaactctacgccggcaaactttcgtttcaccgtttccgatgaaaccccgaccaatcgcaagactgaccggaaaatcctttcagacggcatttcctgcctgtcgtgtaattccatgtagcgaaatgtacgccattttctacgctttgccaagcattttttacaatataaatgtcaaaacattaattttataaaattgctgaaaatattaaatatatggatttttattttttatatttcaataaatataaatttaattttgatttatatttaaatttaagcataaaatgtcaaatattaaagtaaacatgaaaggcatatattaaatatttatttataacgctatgtttttaaagaaaattaattttaatatattaactagattgtctgcatatattcataggtttgcggtatttcttccaaaacctgcttcgaatttcccgaccaagtcttaaaaatattgtttttgagatacttaaatagcagcgattatcaaatgaaatctgttcatataatctgccattttgcatttaaaaaaacaatcaggagtttcgactcgaaacgcctgatatgttttgtaattttacgtagtcagtaaaaatcggggctgccttccggacgggttttaaaacgcttgtgcagccaaaaatattgttccggatgttcgcgcaccctgtcttcgataaaacggttcatgcgctgcgcgtcggctttcgcgtcttcacccggaaaggatttccaagcagggtagaaatgcaatgtaaccgtattgtctgcctcgcggacgggaatggcgggtatcacttttgcatttgcaagcgcggcaatgcggctcaatccggtaatcgttgccgtctgaataccgaaaaaatccacaaaaaccgaatcgttgcgtccgaaatcctgatcgggcagatacagaaacggcgcgctgcttttgcggaactgtttgacgagggcgcgcagcccttcggtgcgcccgataaggaagacgttgtgatagcggttgcggcctttcaaaatctgttcgtccaatatcttgtttttttgatgggaatacatactgatcagcgggatatcctgattaagcgcgtacaccgccatctcgaacgcggtgaagtgcggatacaggatgatgactttttcccccgccgccagcgcgtcgtccaaataatgcttattgcggtagcgcaccagcgatttcaaacgtccggcaggcgcgtaccaatataaaccgtattccaacatcagtttcgccatgtgtttgaaatgctgtttcaacacggttttacgcttttcctcactccattcggaaaaacattttgccaaattgatttcgccgatacggcggcgcggtttgaccagaaggtaggcaagcaaacccgtcaggtcggcaatcttgtgcagcagcgcaaacggcagaaactgcaaaacatacagtacaaaaaatataaatttcatctcgatacacattttcttttcagacggcaaaatacaaatgccgtctgaaactattgaaacctgccgcgcttgacctgcatccccgaaggattgagtttggcggcaagcccgtggttgcgtaaggcgtgggtcagcgcgacggcaagaccgtccgccgcatccggctggggcgttcccgaaagtcccaacatctgcaccaccatatgctgcacctgttcttttgccgccttgcccttgccgactaccgcctgtttgacctgcaaggccgtgtattccgaaacgggcagcttatggctgaccaatgccgccaatgccgcgcccctagcctgaccgagcatcagcgtcgatgccggattgacgttgacgaacacctgttccactgccgcctgttgaggcttgtaaacggtaacgacttcgccgatgtgccggacgatgacggcaatcctgtctgccagaggcgcatcggcaggcgttttgatgcagccggaggcgacgtaaaaatgatcccgccccctgacatcgatgacaccgaaacccgttacgcgactgcccgggtcgatgcctaagatacggacgcttgcagccatattcacaacaaaccgtgttgaatcagcttcttacgcagggtattgcggttcagccccagcatcacggatgctttggactggttgccgccgcattgctccatcacgcacaccagcagcggtttttccacctgatgcaataccatatcgtacacgccgcaaggttcggtaccgttcaggtctttgaaatattgttctaaattttgtctgatgcattgggaaatatcgggaagggtatggggcatgattgcactttcaaaggataatcaagtgttcagaaggcatttgggcggtaggcgcacgcccaactgtcggttttttcggcaagtctttcaagataacctgcaagcatgtcgtattgcgccgccgcactgtccaagcggttgatttcacgacgtgtctgttcgccgtcgggcatttcgtcgatgtaccagcctatgtgtttgcgtgcgatgcgcacaccggcggtgtcgccgtaaaacgcgtgtatggcgcggatgtggttcaaaatagcggcggcgcattctgccaaactcaaggcaggcggcaaaacaccgtgttcggcataatgtttcaaatcgcggaagaaccacggcctgccttgcgcgccgcgccctatcataatgccgtcggcggcggtttgtttgaggacggcttgggctttttgcggcgaagtaatgtcgccgttgacccagaccgggatgttcagacggcatttggtttcggcgatgagttcgtaacgcgcttcgcctttgtacatttgcgtacgcgtgcgtccgtggacggcaagggcggcgatgccgcaatcttcggcgattttggcgatgacgggcaggttttgatggtcgtcgtgccaacccaaacgggttttgagggtaacgggtacgcctgccgcacggacgacggcttccaaaatggcggcaaccagcggctcgttctgcatcagcgcgctaccggcttggacattgcagacttttttagcgggacagcccatgttgatgtcgataagctgcgccccaaggctgacgttgtaacgcgcggcatccgccatctgctgcggatcgcttccggcaatctgcacggcaacaatgccgccttcatcggcaaaatcgctgcggtgcaaggtttttctagtatttctgagcgtcgggtcgctggtcagcatttcgcacaccgcccaacctgcgccaaaatctcggcaaagtcggcggaacggtttgtcggtaatgcccgccatcggcgcaagtgcgatggggttgtcgataaaatagccgccgatgtgcataatggatccgcgtttcaaaaaagtacgccattgtacattttttaagcaggatttccaatctccggacgcgcccgcgattgggtcggacaccgttttatggcataatccgcacacagattccctgccccgccactcacaggcgggcagtttatagtggattaacaaaaaccagtacggcgttgcctcgccttagctcaaagagaacgattctctaaggtgctgaagcaccaagtgaatcggttccgtactatctgtactgtctgcggctcgccgccttgtcctgatttttgttaatccactatatttccccgtcctatcggtttcccgtttcagacgacataaggtctgaaagaaagactacaattatgagtaatccattttcctctttaggtttgggtacggaactcgtttccgcactgaccgcgcaaggttacgaaaacccgacgcccatccaagccgccgccattcccaaagcactcgccggtcatgatttgctagccgccgcgcaaaccggcacaggcaaaaccgccgcctttatgctgcccagtctggaacgcctcaaacgttacgccaccgccagcacctcgcccgcgatgcaccccgtgcgtatgctcgtcctcacccccacgcgcgaacttgccgaccaaatcgaccaaaacgtgcagggctacatcaaaaacctgccgctgcgccacaccgtcttgttcggcggtatgaatatggacaaacagaccgccgacctgcgtgccggctgcgaaatcgtcgtcgccaccgtcggacggctgctcgaccacgtgaaacagaaaaacatccatttgaacaaagtcgaaatcgtcgttttggacgaagccgaccgtatgctggatatgggttttatcgacgacatccgcaaaatcatgcagatgctgccccgccaacgccaaaccctgctcttttccgccaccttctccgccccgatacgcaaactggcgcaagacttcatgaacgcgcccgaaaccgtcgaagtcgccgcgcaaaacaccaccaacgccaacgtcgagcagcacatcatcgccgtcgataccattcagaagcgcaacctgctcgaacggctgattgtcgatttgcatatgaaccaggtcatcgtgttctgcaaaaccaaacaaagcgtcgaccgcgtaacgcgcgaactggtgcgccgcaacctgtccgcacaggcgatacacggcgaccgttcccaacaaagccggctcgaaacactcaacgccttcaaagacggcaacctgcgcgtcctcgtcgccaccgacatcgccgcgcgcgggctggacattgccgaactgcccttcgtcatcaattacgaaatgcccgcccagcccgaagactacgtccaccgcatcgggcgcacggggcgcgcgggcgcggacggcgtggcgatttccctgatggacgaatccgaacagaaaatgtttgaatccattaaagagctgaccggcaacaagctgctcatcgagcgcatcgagggcttcgagccgcaatggtgggaacagggcggcgcaaaaccggaaaaacccgaaatgcgcgaaccgagacaacgcaaccgctacgaatccgccaaagcgcaacgcgaaaaaaacacccggccggaaaatgcggcaaacgatgcgggcgcggcttgcggaaaaattgccggacgcagccgccgaagccgccgggaacaccggacgtgcgccctgctccaaccgcgttacggcgtaaaatagccctgaaaatcaaatgccgtctgaacatttcccgtttcagacggcatttttcaaaccggactgacgcatcgggagcaaccgcccgcaccggataaatttctgccgcaaacagtttcagacggcatttgccgcctgtacaatatagtggattaacaaaaattaggacaaggcggcgagccgcagacagtacaaatagtacggaaccgattcacttggtgcttcagcaccttagagaatcgttctctttgagctaaggcgaggcaacgccgtactggtttaaatttaatccattaatagtgtatattaagtacgtctgatatacacgataccctacgagggtgtaagctttagttcacatttaaaatgacctctttaaacctgtctttcggcaggtttctttttaggttgtttggaaatcgtgtgcagacaaggtgtaaaataggtaacagcataaaataatgcggttttaccgcccatatatttacaaaagccaaatttttaaacatatatccttgatatatacacggcgtaaacatatactggaaacatctttaaattttccgaaattttaaatatgagcaactggaaacccaatattccctataacgatttaccacccctgccgccaaaacaggatattgaaagcaaaaccatcctgaaacgttgtatagccgcccgtgcatcccttgcccgtttaaagcaggcggcagaattgataccgaatcaagccatgctgattaacacccttcctgttatggaagcccgtgcaagttcggaaattgaaaacatcgtaaccaccacggacaagctgtttcaatccctgcaaatggatacggaacggcaagaccctgccacgaaagaagccctgcaataccgcaccgccctgtttgcaggctatgaatcactgacgagccgccctttatgcacacaaaccgccatcatggtctgcaacgccatcaagcacccctacgaaatggccatccgcaaaacaggcggcacagccctaaaaggaggcaacagcggaaatgttgtctataccccgcccgaaggagaagaaaccatacgcggcaagctggcaaattgggagcggtttattcacgaaagcggcgatttagacccgcttatcatcatggcggcggcacattaccaatttgaagccatccatccgtttacggacggcaacgggcggacggggcgcatattgaacagcctgctattgattgaaaaagggcttttggatttgcctattttgtatttgagccgctacatcatcgaaaacagggcggactattaccgcctgcttttaggcgtaaccgaacggcaggactgggaaagctggataatctacatcttagacggcgtagctgacaccgccgattggacggtatcgaaaatagatgcgatacgccgcctgttcgagcagacacggcaacacatacggacacacgcacaaggaatctacacgcacgaactggtaaatcttctgtttgagcagccatatacacgcattgccaacctagaagcggcagggatagccaaacggcagacggcctctaagtacctgaaagagctttcagacataggtgtgctgcaagaaatcgtcatcggcagggacaaactattcattcatccgcgcctaatggaactattgcggggagagggcaacagctttacctcattccaatccctcgttaaagcatagccaaaataatcaataatccggaggtcaatatggcaagaaggtcaaaaacatttgaagaagctgctgctgaggttgaggaacgtttcggtcatcgtggcattaagttggtcgagtttgagggtacagccaagccgtgtgtaatcaactgccctaaacatggaaaccaaacctgttcgaggtactccaatatgttcataggaagtagctggggttgcccctcttgtggtaatgagcaagctgcaaaagccggtatagcgacccttaggaagaatcacatagcgttagaaatgctgaaacaggctgtaacaggtatgaccaagcaagagcgcatcacgacgcaagcctacaatgagatgaccaaatccgtggcaggttcaaacagcatagtccttaacgatgtccaaggcgatacgaccatcaacaaccatcatacgcatacgcacaaccacagcgatgccgatggcaaagcactgtcgatgaggctcacaccccgtcctttgttgtcagaccgtcaggcggcggctttcgcccgtacaggcaaactcacgggcagtttcgacctgtttgcttcggtggtcgccccctcgcagtacacgtttgccgttgccatgcccgacacgtccatgtcgccggttatcgaaaagggagacttgctggtggtcgagccgcgtatgtgccctgcggacgaagacatcgcgctgattgaactgtccgacaagcggctggtcgtcgcgcaccttgttatcgatattgcgggcaggatgctgatttatcagacgggcaggccgtctgaagcctttgacctgcccgaaggcagcacgattttaggtgtggtgctggagtcaaaaaacggtttatgtccgccgcacaggcaagaaggcgtgttgattcggattaccgcccctgatgtgtggacggttggtatgatttccgcttccaaaacgtcgtgtacgcgcccgaccgcagcccggaaatcagccgtatgctttcttcgattttggcaggctacgcgtgggataccgaaaacccgttcgtggcgaaatccgaacaacgcctgactgccttgtccgaatgggtcggtcagttggaaaccgaataaatccgtaccgccatacaaaatgccgtctgaatccaatcgggttcagacggcattgccatttcaactgtttttatgattactcggggcgcatctgcggaaacagaatcacatcgcggatggtttgcgaatcggtcagcagcattaccaagcggtcgataccgatgccgcaaccgccggtcggcggcaaaccgaattccatcgcgcggatgtagtcggcatcgtagtgcatggcttcgtcgtcgcccgcgtctttttgcaccacttgcgctttgaagcgttcggcttggtcttcggggtcgttcaactcggaatagccgtttgccagttcgcggccgacaacgaacaattcgaaacgttcggtcagaccttgtttggtatccgaagcgcgcgccaacggtgaaacttcgaccgggtaatcgacgatgaaggtcggattccacagcttgccctcggcgcaaccttcaaacagcgcgagttgcaggctgccgatgcccggggacggcggcaggctttcgccgtgtttgacgatttcttttttcagccattccgcatcgttcaactgctcgtcggtgtagtgcggattgtattttttgatggcttcgagaatggtcaggcgttcaaacgggctttccaaatcgacttctttgccgttgtaagtgatgtttgccgtgccgtttaccgtgcgcgatgcgttgcggatgatgtcttccgccatctgcatcatgcgttcgtagtcggagaaggcttcgtagaattcgatcatggtgaattcggggttgtggcgcacggacatgccttcgttgcggaagctgcggttgatttcaaacacgcgttccaaaccaccgacaaccaggcgtttcaaatacagctcaggcgcgatacgcaggtaaagcggaatatctaaggcattgtgatgggtaacgaagggttttgccgtcgcgccgccgggaatcgggtgcatcatcggggtttcgacttcgagataatgctcgcccaccataaaattacgcacggattggatgatttggctgcgtttgataaaggtattgcgcgattcttcattggcaatcaaatcaacatagcgttggcggtatttggtttcctgatcgctcaaacctttgtgtttgtcgggcagcgggcgtagggatttggacagcaggcggatgccggacacgcgtacggtcagttcgccgtggttggttttgaacaaagtgccttccgcgccgacgatgtcgcccaaatcccaatggttgaagtcgtccaaaacttcttggctcacgcctttgttgttcagataaagctggatttgcccggacacgtcttgaatggtggcaaaactcgccttgcccatttgacgcttcagcatcatgcggccggccactttgacgggaatgccttgcggatcgagttcttctttgccgatttcgccgtattgggcgtgcaaatcggcggcgaagctgtcgcgtttgaagtcgttgggataggcgttgcgctgttggcggatgttgtgcagtttttcgcggcgcagggcgatgatttggttttcgtccaactgcggctcggtttgcggatggttttgttcgctcataaggttttccgaaaaaataaatcaggcgcaatctgtttcagacgacctgaccgaatcacaaaatttgcgcatattttacgcgatgtcggcatttttttccataaacgcgacaatgccgtctgaaagcggtttgcggtttcagacggcatcgttatcatttgaacattcccgccaaattcaataagaacaaaacggtaaaaccggtcagataaatcaagcctgccaatgcaagggcattcatacctgatgtgagtttgtgtttttcatcacctttaaccaaacggtaattcagccaggcaaacacaggggcggacacaaaagcggcaatcatcgcaaatttgagcagattcgccattacgccgtcaaaccagaaaatcaccgccaaaccgctgcccgccacccaaatattccaggcaaagaattcggcgttgcccgttttgtcttttccgcgcagcaggcgcacgggttcggcaatggcacgggcatagccgtccacgacggtaatcgtcgtgccgtacatacaggcaaacgcgataaacgccaccagcgggcgcgaccagccgccgatggtaacggcgtacatattgatcaattgcccgatatatttgccgcccgccatctgcactgcttcgccgttgccgtattgcacaaacgcgcccagtgcaaggaaaaccaaagccaaaaccgcactggcgatataaccgacgttgaaatcaaaaatcccgtcgcggtattcggaaggattgatgcgttgtttttcggttacccacaaagaattgatggcggaaatttcaatcggcgcgggcatccagcccatcagcgcgatcaggaagcccaaaccggcaagcgtccacggtgtcggctcgataaaatcggactgcatctgcataccgcgcgacatagcgatgccggcggcggcaagcgtggcgatactcaaagtaacgatgatgattttggaaacgcgatccaaagcgcggtaacgtccgctcaccaaaataatcaggcaggatgccataatcaaggcggcaaccgtgccggcatcaaacatcagcgagggaatcgccattttgacgatggcggcggttacaatggcgaccgcgcccgcgttaatcgtggcggagaggatgcacaaaatcaggaatacccacaaataaacgcggcttttctcggcataaccttcaatcaggctcttgcccgtgtccagcgtgtaatgcgcgctgaagcggaaaaacgggtatttgaagaggttggtcaggatgatgatgagcgcgatctgccagccgtaaagcgcgcccgcctgcgtcgaggcaatcaggtgcgaaccgccgaccgccgccgaagccatcatgatccccggacccaatgcgttgattttacttttccaagtcgaaatatgttgttcggacataaagtcttccgtatttttaactgtgtttcaacacacagagccgcatattcggacacagccctatctattgctccaatttgggcgggattgcccccaaacaaacccaaatcctaccgtcttcaaaaacaggataccgcccggtagggaaattttgatgaaaacacgtattgtaacgtaatccaaatacctgccaacacacactattagaacttcatgctcaaacttgactatattttccatattacttccaaaaaaaggcataaaacgacattttatgcctaaaattttacaacaaacaaccttacatcgcttttttcgcgcaaacacgcaccatccgatcagcccgtccgttttgcagcaggctggcgatttgataagatggttatgtttttcagacggcatttcagatttccgtccatgccatctgaagccgcaaaacccgattggaggaactgttatgaataccgtatcgaattatctgtccgcattacgcgaagccatgaaggcgcaaggcttggatgcactcgtcatcccttccgccgacccccacctgtccgaatacctgcccgagcattggcaggcgcgccgcgaattatcgggctttaccggctcggtcggcacgtttgtcctgaccaccgatgaagcgggcgtgtgggtggacagccgctattgggaacaagccgccaaacagcttgcgggcagcggcattgtgctgcaaaaaagcgggcaagtgccgccgtacaacgaatggctcgcggcaagcctgcccgaaaacgccgccgtcggcatcccttccgatatggtctcgctcaccggcaaacgcactttggcgcaatcactcgccgccaaaaacatccgcatcgaacacccggataatttactgaatcaagtgtggacaaaccgccccgccctccccgccgaaacggtgttcatccacgaccccgactatgtttctgaaaccgccgccgaaaaactcgcccgcgtgcgcgccgtgatggcggaaaaaggcgcggattaccacttggtttcctcgcttgacgacatcgcctggctgaccaacctgcgcggcagcgacgtgcctttcaatcccgttttcgtgtccttcctgctgattggcaaagacaacgccgtcctgtttaccgaccgatgccgtctgaacgccgaagccgccgccgcgctgcaaaccgccggcatcgcggtcgaaccttacgcccaagttgccgacaaactcgcgcaaatcggcggcgtgctgctcatcgagccgaacaaaaccgccgtcagcacgcttgtgcgcctgcccgaaagcgtgcgccttatcgagggaatcaacccatccacgctgttcaaatcctgcaaatccgaagccgacatcgcccgcatccgcgaagcgatggaacacgacggcgcggcgttgtgcggtttcttcgccgagtttgaagacatcatcggcaacggcggcagcctgaccgaaatcgacgtggacaccatgctttatcgccaccgcagcgtgcgcccaggcttcatttcattgagtttcgacaccatcgcaggcttcaacgccaacggcgcactgccgcattacagcgcgacacccgaaagccacagcaccatcagcggcaacgggcttttgctcatcgactccggcgcgcaatacaaaggcggcacgaccgacatcacccgcgtcgtccccgtcggcacgccgagtgccgaacaaaaaagcgacaacaccctcgttctcaaagcccatatcgcgcttgccgaagccgtgttccccgaaaacatcccctcgccgctgattgatgcgatttgccgcaaacccctgtggcaggcgcaatgcgactacggccacggcaccggacacggcgtaggctatttcctcaacgtccacgaaggcccgcagcgcatcgccttcgccgcccccgccacgcccgaaaccgccatgaaaaaaggcatggttacctccatcgaacccggactctaccgcccgggaaaatggggcatccgcattgaaaaccttgccgccaaccaagccgtcgccgcccctcaagaaaccgaattcggcagcttcctctgttttgaaaccctgaccctctgccccatcgacacccgcctgatggacaccgccctcatgaccgacggcgaaatcgactgggtcaaccgctaccacgccgaagtccgccgccgcctcgagccgctgaccgaaggcgcggcaaaagcgtggctgatcaaacgcaccgaaccgctggcgcgttaaacagcacggcgcaaaaaatgccgtctgaaagcccttcagacggcattggtttcccaaaacatcccgcaccgttttcatcttgccgcaagcaaatatagtggattaacaaaaatcaggacaaggcgacgaagccgcagacagtacaaatagtacggaaccgattcacttggtgcttcagcaccttagagaatcgttctctttgagctaaggcgaggcaacgccgtactggtttttgttaatccgctatattccgccatctctaagatttacagcgatacacgggtgatttaaggaatgcccgaaccgtcattcccgccacttttcgtcattcccacgaaagtgggaatctagaaataaaaagcagcaggaatttatcggaaataactgaaaccgaacagactagattcccgcctgcgtgggaatgacaattcgagacctttgcaataacataggttactaaaattttatgctcaatctcattttcaaaatgcaaaacttttctgatttttcctactttttgctcaatattaggaaggttttaggcaattgaaaattttttggcgcatttttatgcgtcaaatttcgttaacagactatttttgcaaaggtctcactatatgtgcaaaccaagccaaaaatgcgaaataccgtctgaaaatctttcagacggtatttgctgtctttattgccgtttttcttccgtatccggatttttgtttggggctgaagcagattggcagtcagattgcaatcaaagaatgaaggcgagccgtcaaaaacaaagctatccgcttcaccgccccgatatttagaatttgtggcgcaaaccgacggaggcggcattaatttgagtgtagttgccgatgccggtattgcgtttcagccaagcgccagacacgatggcggaagtgcgtttggaaaaatcataatcaacgccggcgatgatttgatcgtagctggtattttcgccttttttaccgcgttcgataaagtcgaaaccatgggcatagctgatgcgtggaactgcattaccgaagcggtaggaagcagtggcggcaatttcggtcgtactgtttttggttttgtcgccattttcagacaaatccaactgagccgccaaggcgagattcaagccgccttcctcatagccgcccgtcagacggtgtacctgatggtttttcaagggatcggtacctttggcttgatcactcccgctgccgatcaagaacaactcaaaagcattacgtccgacattggcgtgtctcgcatatttaaaggcatagttcccggcaaaaccgccatttttgtaattcagaccggcataatacacatccgatccgggcttgccgacaacagccggaacgagagtaagattattgtttgtattcttagtataataagccggcgtataggcggacttgctgttttggatcggaacgaattgaacgctgccgctgaaaccggaaaattcgggggaatcgtagcgtacggaaaccggcatgtcgtcgtggcgtttgaaaatacccaattgcgaagccacatcattattgctgtcccaaggatcaatggcttggctggcatcgtcaaactgattcgcaacgcgaccggcgcgcagcgtaccgaattcgcctgccaagccgataaaggattccctgttgccccactgggtcgcgccgccgccggcaacggatacgtcttgctcaagctgccaaacagccttcagcccgtcgcccaaatcctcactccccttaaagccgataaacgagccgaaatcactgattttcgtcctgatgcggcttttggccttagtaactttagtaacttttacctgaccgctcgctccaccgttagcggcttgtgcttcagtcaattgcagctggtagttcctgccttccacgccggctttgatttcgccgtataggctgacatcggcaacggccgcaagcggcagtgcggacaatacgagggcggtaagtttttttcgcatatcggcttccttttgtaaatttgataaaaacctaaaaacatcgggcaaacacccgatacgtcttcaattatacccccccccccgcaaaaaaccatttttcagaacaaatatctgataaatgccgcaacctttattttaaaaatgattatattttgatataaaacaatagcttattttttcaaaaacgttgtgtttctacaacacaattcaagcgcagacctcgtgcgagccgatgcgctgctgcccggatgcagtctcggctttttaaaacgccataaaaaaacacacgcggcactttatagtggattaacaaaaacaagtacggcgttgcctcgccttagctcaaagagaacgattctctaaggtgctgaagcaccaagtgaatcggttccgtactatctgtactgtctgcggcttcgtcgccttgtcctgatttttgttaatccgctataaagaccatcgggcatctacagccgtcattcccgcgcaggcgggaatctagaatttcaatgcctcaagaatttatcggaaaaaaccaaaacccttccgccgtcattcccacgaaagtgggaatctagaaatgaaaagcagcaggaatttatcggaaatgaccgaaactgaacggactggattcccgcctgcgcgggaatgacgggattttaggtttctgattttggttttctgtttttgagggaatgacgggatgtaggttcttaggaatgacgtggtgcaggtttccgtacggatggattcgtcattcccgcgcaggcgggaatctagaatttcaatgcctcaagaatttatcggaaaaaaccaaaacccttccgccgtcattcccacgaaagtgggaatctagaaatgaaaagcagcaggaatttatcggaaacgaccgaaactgaacggactggattcccgcctgcgcgggaatgacgggattttaggtttctgattttggttttctgtttttgaggaatgacgggatgtaggttttcttaaccctgcgtcctagattcccactttcgtggtaatgacgggatgtgggttcgtgggaatgacgtggtgcaggtttccgtgcggatggattcgtcattcccgcgcaggcgggaatctagaccttagaacaacagcaatattcaaagattatctgaaagtccgagattctagattcccgctttcgcgggaatgacgaaaagtggtgggaatgacggttcagttgctacggttactgtcaggtttcggttatgttggaatttcgggaaacttatgaatcgtcattcccgcgcaggcgggaatctggaatttcaatgcctcaagaatttatcggaaaaaaccaaaacccttccgccgtcattcccacgaaagtgggaatctagaaatgaaaagcaacaggaatttatcggaaatgaccgaaactgaacggactggattcccgcttttgcgggaatgacgggattttaggtttctgattttggttttctgtttttgagggaatgacgggatgtaggttttcttaaccctgcgtcctagattcccgcttttgcgggaatgacgggatgtgggttcgtgggaatgacgtggtgcaggtttccgtgcggatggattcgtcattcccgcgcaggcgggaatccagaccttagaacaacagcaatattcaaagattatctgaaagtccgagattctggattcccgctttcgcgggaatgacgaaaagtggtgggaatgacggttcagttgctacggttactgtcaggtttcggttatgttggaatttcgggaaacttatgaatcgtcattcccgcgcagacgggaatctggaatttcaatgcctcaagaatttatcggaaaaaaccaaaacccttccgccgtcattcccacgaaagtgggaatctagaaatgaaaagcagcaggaatttatcggaaatgaccgaaattgaacggactggattcccgcctgcgcgggaatgacgaattttaggtttctgattttggttttctgtttttgagggaatgacgggatgcaggttttcttaaccctgcgtcctagattcccgcttttgcgggaatgacggcgacagggttgctgttatagcggatgaacaaaaaccagtacggggttgtctcgccttagctcaaagagaacgattctctaaggtgctgaagcaccaagtgaatcggtttcgtactatctgtactgtcttcggcttcgtcgccttgtcctgatttttattaatccactataatttcctgcgtgtgtcgggtgtatcgaaatcaagccgaatcaaatatatcggacttcgataatgtcgtattcgcgcacgccgcccggggcttggacttccgccgtatccccctcttccttgccgattaaggcgcgggcgatgggtgagccgacatagattttgccctgtttgatgtcggcttcgtcttcgccgacaatttgatagataacgtgttcttccgtttccaaatcttccagcgtaaccgtcgtaccgaacacgattttgccttcggcgtggatttcggtcggattgatgatgtgggcaacggaaagtttgtgttccagctcggaaatgcggccctcgataaagccttggcgttctttggcggcttcgtattcggcgttttcggacaaatcgccgtgcgaacgggcttcggcaatcgcttcgatcacttcgggacgcgccacgcttttgagctgctgcaattcctgtttcagcaattccgcaccgcgtacggtcagggggattttttgcatcggtcttttttctccatattccggcacaccggtttgcggcagcaagcataccgcgtaccgtcttgttttgtgcgtccggatattaaaataaaaatacaagccgcccggaaaatcggcggcttgtctgtcgttgaacagcggctattctaccaaattctatgaaattggcaatcgtgccgcgccgccggcaaacgcgccatgtccgcaacaaaagctgaaaatatgccgacaaagaaattttagaaacaaaaaatttaaaaataatcaattttcggcataaaaaaccacatttacggactttaaaaccgaaaatgccaagcctgagatttttcatacagcatttgcaccagtataatgcaggctgtttttatctttaataatattgacgttttgccatgaccgaatccgtccgcctccccgtcgcccgtctcaaaccttccaccgtcgccctgcccggctccaaaagcatcagcaaccgcaccctgctgcttgccgccttgtccgacaatgcttgcgaaatccattccctgctcaaatccgacgataccgaccgtatgctcgaagcactcgataaactcggcgttcaaatcgaatatcttgccgaagaccgtctgaaagtgcacggcacaggcggacgcttccccaaccgcactgccgatttgtttttgggcaacgcgggcacggcgttccgcccgttaaccgccgctctggccgttttgggcggcgattatcatctgcacggcgtgcctcgtatgcacgaacgtcctatcggcgatttggtcgatgcgttgcggattgccggggccgatgtcgaatatctcggcaaggaacactatccgccgcttcatatcggcgaacgccaagacaacggcgagcgcgtgattccgattaaaggcaatgtgtccagccagtttctgaccgcccttttaatggcgttgccgctgaccgggcaggcgtttgaaatccgtatggtcggcgaattgatttccaagccctatatcgacattactttaaaactgatggcgcaattcggcgtacaggttatcaatgaaggctaccgcgtcttcaaaattcccgccgatgcgcactaccacgcgcccgaacacttgcacgtcgaaggcgatgcctccagcgcgtcctacttcctcgcagccggtttgattgccgccacgcccgtccgcgttaccggtatcggcgcaaacagcatacagggcgatgtcgcctttgcccgcgagctggaaaaaatcggggcggacgtggtttggggcgaaaacttcgtcgaagtttcacgcccgaaggaacgtgccgtccaatcctttgatttggatgcgaaccatatccccgatgccgccatgaccctcgccatcgtcgcgcttgctacagggcaaacctgcacgctgcgcaacatcggttcgtggcgcgtcaaagaaaccgaccgcatcgccgcaatggcaaacgagttgcgcaaactcggggcaaaagtcgtcgaagaagccgaagcaattcacatcaccccgcccgaaacgctgacacccgacgccgtcatcgacacgtacgacgaccaccgcatggcgatgtgtttctcgctggtttcgctgttgggcgtacccgtcgtcatcaacgatccgaaatgcacccacaaaaccttcccgacttatttcgacgtgttctcatcgctgaccgaaacagcggaataaggcggcattttgccgcgattccggcgcggcgcggcgggcggctcattctgtaaaaaaagtatgtgcgccgaggtagtttttggcgtaaaacggtgtggagagtttttcggttttgatggttttgccgctgctgggggcatggatgaattcgccgttgccgatgtagagtccgacgtgtgagtagcggtgtgcgccgccggtgttgaagaatacgaggtcgccggccttgaggcggctgtcggggattttgcggcttgccgccgccatgtcgcgggcggtgcgcggcagcttgacgttgagggcgtttttgtaaacgaattgaatcatgccgctgcaatcgaagccggttgcggtgctgctgccgccccatttgtagggcgtgccgatgagtccgaggctgtggagcatgagttcctgcgagccttgtgtgcggtcgatgtggctgatgcggacggcttggatttgccggactgtctgtttgggtttcggttggcggtgtttgccggaggtcgtgccgcatgaggcgaggagcagtgcgctgagacagaggaaaagggttttgtcggggggaaacatggtttttcctttgcgggttcggatatccgtctgaaggtgtttcagacggtatagtggattaacaaaaatcaggacaaggcgacgaagccgcagacagtacaaacagtacgaaaccgattcacttggtgcttcagcaccttagagaatcgttctctttgagctaaggcgaggcaacgtcgtactggtttttgttaatccgctatatttctataataaaccttctatgggcagcagggataggatttttgcggcgatgcgtttccaaagtttggcttcgggttcgttcgggtaggtttttcgggtggcgggatcgtgccattgcaggcggttgtgcctgtcgagggtaacgcggtaggcgtaggcgggtgtggtatcggcaagggtgcgctccatctgttctgcgattttggggctttcgataacaacgcccatttcggtgttgagacgcgcggaacgggggtcgaggttgaacgaaccgatgaagatgcgtttgccgtccacaatgaaggttttggcgtgcaggctggttacggagctgccggtcaggcctttgtcttttgtggcggggacggcatggttgggttgcagctcgtagagtttgatgccggctttgagcagcggttttcggtatttgacatagccggaatggacggcggcaacgtcggtcgcctgcagcgagttggtcagaacggtaacgtctatgccgtcctgcaccagttttgccagtgcgtctgtgccggattttgtgggaacgaaatagggtgaaaccagatagacgcttttttcgggctgtttgagcgcgtcttgcagccgcccggcaatcggcggtttgcggcggtcgcggtcgagtccttttgcagggtcgtcgctgatgaggcgggttcggacgctctgccagtcgatgcatcctgtctgtattttttggtagaggggcgactgttcgacggtttcgcggtagcgcaggagcgcgtgtctggacgtttcgtcgttgtatccgagtgcttgaagacccttgccgatgtcgccgctgcggatgatgcgcgtggcgttgtgggcggaatggcttgcccagtagcggtcgaagtcgtgcgatacttcgccgacgacgctgccggtggcgaggatgtccaaatcggcgaaaacggtgtcctcaccgactttgaagtattcgtcgccgatattgcgtccgccgagtatggtggcgcggttgtcggcggtaaaggatttgttgtgcatgcggcggttgaggcgggggaagtcggtcaggtagccgagtgcgcgccattttcgtaagacgaaggggttgaacaggcgcacttcgatattgggatggctgtcgagggcaagcaggaggtcgtccaatccgcgcgtgttgttgtcgtccaacagcaggcgtacgcgcacaccgcgttctgcggcaaggtacacgaggttgaacagcagcctgccggaaatgtcgttgcgccagatgtagtattgcaaatcgaggctgtgttcggcagattcgataagggcggcgcgggcggcaaaggcttcgtgggggtcgttcaacagatagatatcggatagcccgttggtatgaggggtgtgccggatttgcaggatgttgtccaggcggacgggtttggaagtattgaaatgacggctttccgtccgttcttccagtgggggcaaccatgaagaacatgaacagagaaggaggcataaaagggaaattaggctgcgtgttttcatcagggatatggtttcagacggcattgcctgtgttttggggttggcgcgcatggaagtgcggtatcataatccaaacgttgaaacgggtaaaagttttgcgtgtggaccgcttcaggacggtgtgttccgtgtcaggttggtgccgtctgaaacgtgcagccgtttgaaaaccagcgatgatgcaagggtgatgccgccgatgctgagcagggtcatacggaaggcggaatgcagacctgaagaagccggtatcagaaatgtccagtttttaaggattaatgcgccggcaacaatgcccatgctgatggcaagctgttggttgaccgccatcaggctgttgccgctgcctgtttgttgcgggcgcaaatcggcgagggtcagtgtgttcatggcagaaaactgtagggagttgcacgcgccgatcgccagcgagaggaaaacccaaatccacagcggcgagtttccgtcaggcagggcgagcagcatgatgaaggcggcaagcagcttggtgttccaaagcagtaccgtgcggtagccgaaacgtttcatgagcggtgcaatcagcggtttgaccagcagcgaagacagggcgacgggtgcgaccagccaacccgacaggcttgcgccgaagccgaaagcgatttgaaacatcaggggcatcagaaaaggaatcgagctgatgccgagacggctgaacagattgcccgccagtcccagacggaaagtgcgtatcagaaacaggtcggcggaataaatcggtttggacgcggttttcatatgtcggaaataacggcgtgcaaacagcagtccgccgcacagcggcaacagtgcaaaatacggaggcagcgcgtgcgacaggctttctgccgaaagtaacaagaggcacgcggcggcagaaaaaatcagataacctttgaagtctaaagagatattactgcctttaatatcgggcatgatgttgcgtcccaatatgaaacccagcagaccgatgggcaggttgagcaggaaaatccagtgccacgaagcgtattcgaccaaataaccgcccgccaaaggccctaaaaccggcccgattaatgcgggcataaccgcataattgatggcattgagcagcttggacttgtcgtacacacgcaagatggtcagacgcggtatcggaaccagcatcgaaccgccgatgccctgaacgacacgggaaagcgtcaattcaaacagcgaacccgatgcggcgcacaatgccgatccgagcataaaaacggcaatcgaaccgaaaaagacttttttcgttccgaacctgtccgccaaataaccgctcaaaggaatcagcagggcaaccgtcagcgtgtaggaaataactgccagttgcatatccagaggcgactcattcaggtcggcggcaatttcaggcagtgcggtatttaaaatggtcgcatccaacatctgcataaaaatggcaattgccagcagaagcggcagccaaggggatggtgcgcgggcggatagggtgtttttttccatagggcgattgtaccccatccttgtgccgttattgttttcagatgctgtctgaatgccgtcagagtcggcatcttgaatgttcacaagcaaacgaaccggcattgcattgtaatgataattattatcgaaaaccatcagattaaggtacagtaagcgttatgggggcagtttgtaagaaaaaccggattattttttaaaattagacttgacccgcaacagtcaattacttaaagtaaacgcttacctttctacagagaaaaacgggtttcccgttatcaaaaaacatgagcgcaaccattcccccaaaaatcatccgatacgacagcaatccgaccgatgtctattttttcggcacttgcgtccttgatctttttatgcccgaagcaggcatggatgccattaccctaatcgagcagcagggcatacgcgtccatttcccgatggcgcaaagctgctgcggccagcctgcctattcatccggccatccgaccgaagccttcgatgtcgccaaagcacaactcgaccttttccctgaaaactggccgatcgtcgtgccgtccggctcgtgcggcggcatgatgaaacaccactggccgacgctgtttaaaggcagcgagtacgaggaaagggctgtggattgcgccggccgcatcatcgagtttacccatttcctgcttgccatcggtttcaaacccgaagacaagggcgaaccgctcaaagtcgccgttcacacttcctgcgccgcccgccgcgaaatgaatgtccatctttcaggctggcaactgattgacggtatggaaaacgtcgaacgcatcgtccacgaccacgaaagcgaatgttgcggcttcggcggcacattctccgtcaaacaagccgatatttccggcgcaatggtaacagacaaagtcgccgcgctgaaagaaaccggcgcaaccgaaatcatcagcgcggactgcggctgtatgatgaacatcggcggcaaaatcgccaaggacgagccggatatgccgcgtccgaaacatatcgcatccttcttgttggaacgcaccggaggcaaagcatgagcgcgcgtgaaaatattttggcaaaactgaaaaaagccgacgcattgccgatggaagaacctgcggtttttgattattaccgtgaaatgggtgtttcttggggcagcgaagttgagcgtctgaaacattgggctgccgctatgcgtgcggtcaaaaccgaaatttattgggtgacgaaaagcaattggatgcaggttttccgcgaagcggcagaaggcaagggtttgaaaaacatcctgctgcccttggcgaccgaacacggacaaattgcccgtgccgcattggcggacagcaatatcgaaccgattgccttcgagcgcgaaatcgatacttggaaaaccgagtttttcacgaacatcgatgcgggcttcagcggcgcgcaatgcggcatcgcccgcaccggcacgctgatgctgttttccagccccgaagaaccgcgtactttaagcctcgttccgcccgtgcatttctgcctgttcgatacgtccaagatgtacaacgagtttcataatgccgtcgaaggcgaaaaactggtggaaaacggtatgccgaccaatgtattcctgatttccggcccgtccaaaaccgcagacatccaactgacgcttgcttacggcgcgcacggcccgcgcgatttggtcatcctcgccatcctgcccgaccacatttcccctgccgatttggaggaaaacgcatgactacgcaaaccatcaaatttcacatgaagccggaaactttcaagcaaaacgccgcaatttcccttcaagacaagcctttgcgcaaaagcctgcgtaccgcgatggatatgctgatgaccaaacgcaaagccgttttgaccgacgaagaagagctgcaaagcctgcgcgatttgtgcgaacacgtccgtcagcgctcattgtctaaattgccagccctgctggagcagctggaagaaaacctgactaagttgggcgtgaaagtgcactgggcagaaaccccgaccgaagcctgccaaattatccacgacatcatcacagccaaaaacggcaagctgatggtcaaaggcaaatcgatggtcagcgaggaaatcgagctgaaccattatcttgaagcaaaaggcattaaagcggtagaaagcgacttgggcgagttcatcgtccaaatggcaggcgaaaaaccgacccatatcgtgatgcctgctatccacaaaaccaaagaacaggttagcgaactgttccaccaaaacctcggtacgccgctgacagacgatgtagaccaactgaccggcttcgcccgtaaagcactgcgcgatatttacagcactgccgatgtcggtttgagtggcgtaaactttgccgttgctgaaacaggtacgctgtgtctggtggaaaacgaaggcaacggtcgcttgagtaccaccgtaccgcccgtgcatatcgctattaccggcattgaaaaagtggtggcgaaattgtccgacatcccacccttgtacagcctgctgccgcgttctgccattggtcagaacattaccacttatttcaatatgattaccggcccgcgccgcagtgaagaattagacggtccgcaagaaatgcacttggttctgctcgacaacggccgcagccaggcttatgccgaagaccaaatgcgccgcaccctgcaatgtatccgttgcggcgcgtgtatgaaccattgcccggtttatacccgcatcggcggcgcggcatacggcacaacctatcccggtccgattggcgagattatttccccgcacctgttaggcttggatgccactcgcgacctgccgaccgcctgcacgatgtgcggcgcgtgcgtggaagtttgtccggtacgcatcccgattaccgaacaaatgcagcgtttgcgcgttgaagcgcaacgttcgccgaccgaaaccgtgccgcaccccatccgggggcaaggcgcatcgcataccttcggcgaacaaatggcgtggcgcacattcaacggtattttcagcggcagcaaaacctaccgcgccttcggttgggcagccaccaagttccgcaacctgaccccgcgcaaacagttgggttggacgcaaaaccgcgtgccgatgaaaccggcgaagaaaaccctgcacgaactaatggcagaaaaaatgcgccaaaaagaacaggcataaaaagttgttcgcaaaaatgccgtctgaaacccgaaacagggcttcagacggcatttgtatagtggattaacaaaaatcaggacaaggcgacgaagccgcagacagtacaaatagtacggcaaggcgaggtaacgccgtactggtttaaatttaatccactatatattcgcagacggtgggttttaaatttgttccaattccatattcaaaacagcctgttcctgtttggctcggaagtctgccagtttttgcgccagttcgggggtttcgttggcgagcatggaaacggcgaacaatgcggcatttgccgcgcctgcctcgccgatggcgaatgtggcgacgggtacgcctttgggcatttgtacaatcgataaaagcgaatcttcgccgcgcaggtatttgctggggacgggtacgcccaaaacggggacggtggtcttggcggcaaccataccgggtaaatgcgccgcgccgcccgcacccgcgatgatggctttgatgccgcgcgcccgtgcggtttcggcgtattggaacatcaaatccggggtgcggtgtgcggaaacaacgcgcgcctcatattctacgccgaactcttcaagaaactgcgctgcctgccgcataacgggccaatcgctgttgctgcccatgatgatgccgatttgtatcataaatcctccttggtgcggatggggtaaaaagcggaaaaatggaaaaactatcgtttgcgcacggctgcggcggcgcgttttgccgccgggctgccgggataggtctgtatcaggctgcgccaagtcgcccttgcaatgtctttttgctgaagcctgtattggcattcgccgattttgaacatggcttcaggcgcggttgggctgtctttgaaacggttggcgtaacgccctccgatttcgatgacggattcgcagttgcccatacgcgccctgctttgcagcaacaggtacatactgcgttgcgcgatgctgccgccgtcgcctccgtccgcgcctttcaacagggaggcagcggcagaaaacttgccgcttttatagtgtttgagtgcctgattgtagaggttttgtgcggtttcgacagtatgtgcggatgcgctgccgccttcggtattgaggtaatgctctttcaacttgcggtcgtcgagtttttggacgtatgccctgccggaagaatgtgtttttgcgtgttccagtgctttgactttgccgtttaaggtttccacttcgttcgacagccggacgattttgccttccagatagtccaaacggtcttgcaaggtcggaacgggatagggaatgccgtctgaagcattttcccgtgtcgacatttcggtttggctgcctgccggaacgggtgaaacggaagcacaggaggcggacacagacagccaaatgataaaaagcggtaatttgatcttcattattttttcagaagcagggtcaagccgtcgccgacgggcagggtgatggggacgatgcgcgggtcgttcggcaggttttgattgaaatctttgaggatgccgacgctgggcggcgcatcggaagccgcttcgcgcatcacccttccgttcagcaaaatattgtcgatggcgatgatgccgccttgacggacgagtttgaggcaacgctcgaaatattgcggcgtgggcggtttgtctgcgtctatcagtgccaaatcgtagcttccggcttcaccctgtgcaatcaaatcatccaatgtcagcaatgcgggttgcaggtgcaggctgattttatgtgccacaccggcctcgttccaaacctgacgcgccgtatcggtaaaggttacattgatgtcgcaggcggtaatccgcccgtgttcgggcagtgccaatgcaagcgcggtgctgctgtatccggtaaatacgccgatttccagatatttttccgcacggatcagctttgccagccaaaccaaaactgccgcctgttcgcgcgcaatcgccattttgcccatacggtgatgcccggtcttctcgcgcagccgcgtcaaaacgggatgttcgggttcgccgatggcgttcaaatagttttgcaggtccggtgcgacattggacagatgggtcgtcatttcggcggattcagtcttggtaataggtataaggttttttcgccacttttgccgcctcgaagttttcctgttcttcgggattgagttcgacatcccacaaaagccccctgttttccaaacgctgctgttccaactcaggtttttcttcaatcaggcggttgaggaattgtgtggcatcggattggtagtgatacatctttgtgctccaattttacggaatatggcgtgattatactggtattttccaaacgggataaacggcttttatcaagaatacgggcagaaagataaggggttttattatagaataagacgttttttgcaacggaagcccgccttatgtcccgaatcgccgccctgcccgaccatcttgtcaaccaaatcgccgccggcgaagtggtcgaacgccctgccaacgccttgaaagaaatcgttgaaaacagtatcgatgcaggcgcaacggcgattgaagtcgagctggcgggcggcggcatccgcctgattcgcgtcagcgacaacggcggcggcatccaccccgacgacatcgaacttgcgctccaccgccacgccaccagcaaaatcaaaaccttaaacgatttggaacacgtcgccagtatgggctttcgcggcgaaggtttggcaagcatcgcctccgtcagccgcctgaccctgaccagccgtcagaacgacagttcgcacgcgacccaagtcaaagccgaagacggcaaactcagcagccccaccgccgccgcccaccccgtcggcaccaccatcgaagccgccgaactcttcttcaacacccccgcacggcgcaagttcctcaaatccgaaaacaccgaatacgcccactgcgccaccatgctcgaacgcctcgcgctggcgcatccgcacattgccttctcgctcaaacgcgacggcaaacaagtgttcaaactccctgcacaaagcctgcatgaacggattgccgccattgtcggcgaagactttcagacggcatcattgggaatcgacagcggcaacggcgcgctgcggctctatggtgcgattgccaaaccgactttcgccaaaggtaaaaccgacaaacaatactgcttcgtcaaccatcgcttcgtgcgcgacaaagtgatgctccacgccgtcaagcaggcataccgcgacgtattgcacaacgcactcactcccgccttcgtcctctttctcgacctgccgcccgaagccgtggatgtcaacgtccacccgaccaaaaccgaaatccgcttccgcgacagtcagcaggtgcaccaacttgtgttccacacgctcaacaaagcccttgccgacacacgcgccaacctgaccgaaagcgtcggcaacgcaggcgaagtgttgcatgacattaccggcgttgtctccaccccaatgccgtctgaaaacgacagcgaaaatctgtttgatagcgtatccaactacccgacaggcaacaaatcagatacacacaatgcctttggttcatcaggcaaaaccgcgcccatgccctatcagtccgcatatgcgccgcaacaacgcagcctgtccctgcgcgaaagccgcgcggcaatgaatacttacgccgaactttacaaaaaaaccgacgacatcgaccttgagttaagccgattcgagcaggcacgtttcggcaatatgccgtctgaaacgcctgctccccaaacagatacgccgctttcagacggcatcccgtcccaatccgaactgccgccgctcggttttgccattgcccaattacttggcatctacattcttgcccaagccgaagacagcctgttgctcatcgatatgcacgccgccgccgaacgcgtcaactacgaaaaaatgaaacgccaacgtcaggaaaacggcaacctgcaaagccaacgcctgcttattcccgtaacctttgccgcgtcccacgaagaatgcgccgcccttgccgattatgccgaaacgctggcaggcttcgggctggaattatccgatatgggcggcaacaccctcgccgtccgtgcagttcccgccatgctcggcaaagccgatgtcgtctcgctcgccaaagacgtattaaacgaactcgcccaagtcggcagcagccaaaccatcgaggaacacgaaaaccgcatcctcgccaccatgtcctgccacggctcgatccgcgccggccgccggctcaccctgcccgaaatgaacgcccttctgcgcgatatggaaaatacgccgcgcagcaaccagtgcaaccacggcaggccgacttgggtcaaactgactttgaaagaattggacgcactgttcttgcgcggacagtaagccgaaagtgctagaatacgccgcccgagaccgccgttcagacggcattccgacgcaccgacagaaacatcacgaccgaaaccaagagaaaaacatggcctatcaagttctcgcccgaaaatggcggcccaaaacctttgccgacttagtcggtcaggaacacgtcgtcaaagccctgcaaaacgccctggacgaaggcaggctgcaccacgcctacctgctgaccggcacgcgcggcgtaggtaaaaccaccatcgcccgcatccttgccaaaagcctcaactgcgaaaacgcgcaacacggcgaaccttgcggcgtatgtgaaagctgtacgcagatcgatgccggacgctacgtcgacctgctggaaatcgacgccgcctccaacacaggcatcgacaacatccgcgaagtcttggaaaacgcccaatatgcaccgaccgccggaaaatacaaagtctatatcatcgacgaagtgcatatgctttccaaaagcgcgttcaacgctatgctcaaaacgctggaagagccgcccgaacacgtcaaattcatcctcgccaccaccgatccgcacaaagttcccgttaccgtcttgagccgctgcctgcaattcgtcttacgcaatatgaccgcgcaacaggttgccgaccacctcgcccacgtcctcgacagcgaaaaaatcgcctacgaacccgccgccctgcaacttttgggacgtgccgccgccggatcgatgcgcgatgccttgagcctgctcgaccaagccatcgccctaggttcgggcaaagttgccgaaaacgatgtccgccaaatgatcggcgcggttgacaaacaatacctttacgaactgctgacaggcatcatcaaccaagacggcgcagccctgaccgccaaagcgcaggaaatggcggcgtgtgccgtcggctttgacaacgccttgggcgaacttgccatactgctgcaacacctcgccctgatacaggcagtgccgaatgccttggcgcacgacgaccccgattccgatattttgcaccgcctcgcccaaaccataagcggcgaacaaatccagctttactaccaaatcgccgtccacggcaaacgcgacctcagcctcgcccccgacgaatacgccggctttatgatgaccctgctgcgtatgctggcgtttgcgcccttggcggcagcatcgtgtgatgcaaatgccgtgattgaaaataccgaactaaaatccccatcggcacaaaccgccgaaaaggaaaccgccgcaaaaaagccccaaccgcgccctgaagcggaaaccgcccaaacacccgttcagacggcatccgcagcagcaatgccgtctgaaggcaaaactgccgaacccgttaccaatcaagaaaacaacgatattccgccttgggaagacgcgccggacgaaaccgcagccggcacggcgcaagcatcggcaaaaagcattcagacggcatccgaagccggaacgccgcccaaaaaccaagtttccaagaacgaagcagccgacaacgaaaccgatgcccccttgtccgaagtgccgtctgaaaaccccattcaggcaacaccgaataatgaagcccttgaaacagaagcatttgcacacgaagctcctgcaaaacctttcaacggttacagctttccgaatgatgactacctcgtagaagacggcgcagaaatcccaccgcccgattgggaacacgccgcccctgccgatgcggaagaagaaaacaacgccgacgaaagcagcaacaacgaagaccacacgccatacgccccgccgcccgaattttccaccgaaaactgggcagccatcgtccggcacttcgcccgcaaactcggcgcggcgcaaatgccggcgcaacactccgcgtggacggaataccatcccgacaccggtctgatggttttggcaatgaccgccgaagcacgcgccaccgccgacaaaaaacgcctcgacaaaatccgcgacacccttgcccaagcctacgggctgcaactcaccctgcaaacccaagactggcgtgacgaagccggccgggaaacccccgcgatgcaggacaagcgcgtccaagccgaagacaggcaaaaagcacaagcattgctcgaagccgaccccgccgcacaaaaaatcctccaagcattcggcgcgcaatggcagcccgaatcactggaattggcggcaaaccggccataaacagatataatgccgcccgaacccttcggacggcattgccgtttcccttattcaatcaaaacagacaggagtattcagtatgttcggaaaagccggattaggcggcctgatgaaacaggcgcagcaaatgcaggaaaatatgaaaaaagcgcaagccaaactcgccgaaaccgaaatcgaaggcgaagcaggcaacggcctggtcaaaatcacaatgacctgcgcgcacgaagtacgcaaaatcgacatcagccccgatttgattcaagaagccgccgacgacaaagaaatgcttgaagacctcatcctcgccgccctcaaatccgcccgaggcaaagccgaagaaaccgcaaacaaaacaatgggcgcattcacgcaaggtctaccccccggagtgggcgacttcttccgctgatccccgaccgtcattcccacgcaggcgggaatctagaacgtagaatctaagaaaccgttttactcgataaatttccgtgccgaggggtctggattcccgccttcgcgggaatgacggcatcagtttgcaggattcggcgtgaacggtaaaaacagtgagaatgataagaacgcaaaaacggcaagaatagcgggaatcggcaggctgaagcccaccctaccattatttacacatccgtaccgcttaaatgccgtctgaaacttcgtcattcccgtgaaagcgggaatccaaccccgtcggagcagaaacttacaccccgtcattcccgcgaacgcgggaatccagtaaccgaaaaaccacaggaatctatcggaaaaacagaaaccctcgaccgtcattcccgcgaacgcgggaatccagtaaccgaaaaaccacaggaatctatcggaaaaaacagaaccccccgaccgtcattcccgcgaacgcgggaatctagaacgtagaatctgagaaaccgttttactcgataaatttccgtgccgacgggtctggattcccgccttcgcgggaatgacggcatcaatttgcaggattcggcgtgaacggtaaaaacagtgagaatgataagaacgcaaaaacggcaagaatagcgggaatcggcaggctgaagcccaccctaccattatttacacatccgtaccgcttaaatgccgtctgaaatttcgtcattcccatgaaaacgggaatccagccccgtgggagcagaaacttacaccccgtcattcccgcgaacgcgggaatccagtaaccgaaaaaccacaggaatctatcggaaaaaacagaaccccccgccgccgtcattcccgcgaacgcgggaatctagtaaccgaaaaaccacgggaatctatcggaaaaaacggaaacccccgaccgtcattcccgcgaacgcgggaatctagaacgtagaatctgagaaaccgttttactcgataaatttccgtgccgacaggtctggattcccgccttcgcgggaatgacggcatcagtttgcaggattcggcggaaacggtaaaaacggcagaatcgatgggatgcggcaggctgaagcccaccaaaacacaaaaattccgatgccgtctgaaatttcgtcattcccgtgaaaacgggaatccagccccgtgggagcagaaacttacaccccgtcattcccgcaaaagcgggaatccagtaaccgaaaaaccacgggaatctatcggaaaaaacagaaccccccgccgccgtcattcccgcgaacgcgggaatctagaacgtagaatctgagaaaccgttttactcgataaatttccatgccgaggggtctggattcccgcgttcgcgggaatgacggcatattttttgcatttgatataaagggtcgtttgaattttgttcagcaagtgcaaagtgttgcacataaaagggcgcaggatagaggcaaagcgggcgtaggtcgggctgtagcaactgtatttttcaccccgtcgggcaaaaatatagtggattaacaaaaaccagtacggcgttgcctcgccttagctcaaagagaacgattctctaaggtactcaagcaccaagtgaatcggttccgtactatttgtactgtctgcggcttcgtcgccttgtcctgatttttgttaatccactataccaaaactcaaatcaagccgttcggaggcggctcaaaaaaacggtacttcgcagcagaagtaccgtttatcgggatttcaggttttattcttcggggcgttcgccgtcggtttcgtcctgcgtcccttcggtgatgtgcatttctacgccgttgagggcgcggatttttgcgtcgatttcattggcgacttcgggattttccttcagccagacgcggacgttgtctttgccctgaccgattttcgcgccgttgtagctgtaccacgcgccggatttgttgatgatgtcgtttttcacgccgatgtcgatcaattcgccttcccaactgatgccttctccgtagaggatgtcaaactctgcctgacggaacgggggggcgactttgtttttgatgactttgacgcgggtttcgttgcccaatacctcttcgccttttttgatggatccggtgcggcggatgtcgaggcggacggaagaatagaatttcagcgcgttgccgccggtggtggtttcggggctgccgaacattacgccgatcttcatccggatttggttgatgaacacaaccagcgtgttggtttttttgatgtgtccggtcagtttgcgcaaagcctggctcatcaggcgcgcctgcagtccgacatggctgtcccccatatcgccttcgatttcggctttggggacgagtgcggctacggaatcgacgactaccatatctatgccgcccgaacggacgagtgtgtcgcagatttccaaagcctgttcgccggtatcgggctgggacaggtaaagctcttcgacttttacgccgagtttgcgggcgtaaacgggatcaaaggcgtgttcggcatcgacaaaggcgcacacgccgccgtttttctggcattgggcgacggcttcgaggcagagggtggttttgccggaggattcggggccgaagatttcgacgatgcgcccgcgcggcagaccgccgactccgagggcgaggtctaatccgagcgatccggtggaaatgacttcgaggttttcttcctgctggctgccgtccattttcatgatggcgcctttgccgaaacttttttcgatttgcgccagtgcggcggcaagtgctttgcttttgtcgtctgacattggggttactccggaacaaatgcggtatgtgggatgcggcgcaacacgggctgcggcgcgggatgtgtatcgttttcccgatgtgcgggctatcggtaatgctgcttcacgaggttgccattatcgcatatttccttgcttgccgatatgcgccaggacgcggcggcttgtgccggaatggaatctggatgccgtctaaaaggcggccggctttgttataatggcggctgttttttctgtgtgtgcctgttttatgtgttcctgccttgttgtcaaaaataccgttatcggaagcggacgcaccaaaatcgccgtgccgcttgtcgcccgcgatgccgccgaactttccgccgtacttgagcaaatcaaaaatatgcccttcgatattgcggagttccgcgccgactttttggaatgcgcgggcagtatcggcgaaatattgcaccacacgcagaccgtccgcgacgcgctgcccgacaagccgctgctgtttacgttcagacggcatggcgaaggcggctcgttcccgtgttcggacgattattattttgaactgctcgacgcgctgatcgaaagccgcctgcccgacatcatcgacatcgagctgttttccggcgaaaccgccgtccggtgcgccgtggcaaatgctcaaaaaaacggcatcgccgccctgctctgcaatcatgagtttcaccgcacgccgccgcaagaagaaatcgtatgccgtctgaaacagatggaggactgcggcgcggacatctgcaaaattgcggtgatgccgcaaagcgcggaagatgtgctgactttgctttccgccacgctcaaagcgaaagagcttgccgccaaaccgattgttacgatgtcgatggggcagacgggggcggtcagccggcttgccggacaggtgttcggctcaagcatcacgttcggttcgggaacgcaaaactccgcgccggggcaaatcggcgtatccgccctccgtgcgacactcgactgcctcgaaaacggcgcagactgatttcagacagcatcaaaacatgatgaaactcaatccccaacagctcgaagccgtccgctacctcggcggcccactgctcgtccttgccggtgcaggcagcggcaaaaccggcgtgattactcaaaaaattaagcatttgattgtcaatgtcggctacctgccgcataccgttgccgcaattacctttaccaacaaagccgctgcggaaatgcaggagcgcgttgccaaaatgctgcccaaaccgcaaacgcgcgggctgacgatttgcacgttccactctttgggcatgaagattctgcgcgaagaggcgaaccatattggttacaaaaaaaacttctccattctcgattctaccgacagcgcgaaaatcatcggcgaactcttaggcggtacgggcaaagaagccgtattcaaggcgcagcaccagatttccttgtggaaaaacgatttaaaaacgcctgaagatgtcgttcagacggcatcgaacatttgggaacaacaaaccgcacgcgtgtatgcgagctatcaggaaaccttacaaagctatcaggcagtggacttcgacgacttaatccgcctgcctgccgtgctgttgcagcaaaacagcgaagtgcgcaacaaatggcagcggcggctgcgttatctgttggttgacgaatgccaagatacgaatacctgccaatttacgttgatgaagctgctgaccggcgcggaaggtatgtttaccgccgtcggcgacgacgaccagtccatctacgcatggcgcggtgcgaacatggaaaacctgcgtaaaatgcaggaaaactatccgcagatgaaggtcatcaaactggagcaaaactaccgctccaccgcgcggattctcaaaatcgccaacaaagtcatcgaaaacaaccccaagctgtttaccaaaaaactttggtcgcaattgggcgaaggcgagccggtcaaagtcgttgcctgccaaaacgagcaacacgaagccgactgggtcgtcagccaaatcgtcaaacaaaaactcatcggcggcgacaaaacccaatatgccgatttcgccgtgttataccggggaaagcatcaggcgaggattttcgaggaagcattgcgcggcgcgcgcatcccctaccagctctccggcggacaaagctttttcgacaaagccgaaatcaaagacgtgttgtcttatgtgcggctgcttgccaaccccaacgacgatcccgcctttctgcgtgccgttaccacgcccaaacgcggcatcggcgatgtcacgctgggcaagctcaacacttacgcgcacgaacacgaatgcagcctgtatgaagccgcgcaaaacgaagaagcccttgccacgctgaacaataccaaccgccaacacctgcaaacctttatggatatgttcgtcagctacctcgccaaagccgaaaccagcgaagcgggcgagttcatcaacagcctgctcgaagaaatcgactatgaaaaccatttgatgcaaaacgaagaaggcaaagccggcgaaatcaaatggcgcaacgtcggcgatttggtatcatggtttgcgcgaaaaggcggggaagacggcaaaaacatcatcgaactcgcccaaaccgtcgccttgatgacgcttttggaaggaaaagacgaagaagaaaccgatgccgtctcgctatccacgctacacgccgccaaaggtttggagtatccgtatgttttccttgtcggttgcgaagaaggcgttttgccgcacaacgacagtatcgaagagggcaacgtcgaagaagaacgccgcctgatgtacgtcggcatcacccgcgccaaacgccaactcacactgacccactgcgtcaaacgcaaaaaacaaggcacatggcagttccccgaacccagccgattcatagacgaaatgccgcaggaagatttgaaaatcctggggcgcaaaggcggcgaaccgattgtcagcaaagaagaaggcagacgcaaccttgccgatataatcggaaggctcgacaacctaaaaaaaagcggcgcggcggattaaaccggagccgcaatgccgtctgaaggcttcagacggcatattttttggacggcgcgcgtaaagcggtttacgcccacaaatcctgctgctggtttttcggcacaagatgccccacgccgataccgataaggcggaacgcgtcttccgtctgcggcgagacgcgcgccatcaacatttgcgcagcctgcagcagagtgcgcagtcgggcaatacggaggaataagtcagtgtgcgcgtgatgatgcggaaatcgtaggtcttcagcttgagcgttacgctttgggcttcgacgtttttgcgcgtgatttgccgccacaagtcttcggcaagatgggggaggtgtccggcagcctgctcgagcggcaggtcttcgggcagggtaatttctgtggagatttggaggcgttcgcgttcggctttgacggggcgttcgtccgtaccgcgcaccaaatcatagaggcggtatccgtagcgtccgaaatggtttaagagttcgccgcgctcgaaacggcgcaagtcgcccgccgtccgcatacccagcgactgcatttttttcagcgttaccttgcccacgccggggattttgcccaaaggcagggtttccaaaaatgccatgactttgtgcggcggcaacacaaactgcccgttcggcttgcgccagtccgacgcgattttcgccagaaatttgttcggcgcgatgcctgcggatgcagtcaaacctgtttccgcaaaaatggcggcacggatttctttggcaacgtcgccggcgtaagggatgtttttgaaattacgggtaacgtcaagataggcttcgtccagcgacaagggttcgattaaatcggtataacgcctgaatacggcgtgaatctgcgcggaaacctgacggtacaaatcgaaatgcggcggcacatacaccgcttgcggacacagccttttcgccgttgccaccgacatcgcggaatgcagcccgaactgccgtgcctcatacgatgcggcgcaaatcaccgaacgcgcgccctcccacgcgacgaccaccggccgccctttcaaatgcggctgttcgcgcagctctaccgatgcgtagaatgcgtccatgtcgatgtggataattttgcgtgaagacatcggctcttctgaggataaaagggatattctactgccggcatcgggcaaattccaaatatacgccccgatagacctgcctccataaaaatgccgtctgaaacataccctgtttcagacggcatccgcaaaactacggttttcaattaaaactgccaatccagtttcatgctgacagtgcgcggctctccgtagaagttgtttgcgccgcgcgtacggttgtagttgttctcaaaataagtgcgtccgtttaagttcgtaccgatgaggctcaatttggcgtgtttgcccaattcgtaacggacgaaaccgtctatcagcccgtagccgccctgcctgatgttatacagactgcttgtgccgctttgtgcggacacgccgccgccgacggtcagccccgtattcggtatatggaagctcgttccgaaacggaatatgtgcacgggtgtgaaattgctgaagttgtacgggtctgcactggaatttttggcaaggcgttcggcgttgacttcggcggcgtttttgtagcggctcttgttgtaggtgtaacccgcaaagactttccaatcttcgttcaactcacccgacaactcgaattccgcacccctgctgaccactttgcctatcggtttggcaacggtttggaacgacccctgcttgccgcctgctccgggaacatagccgaaatcgacgaccgtgcggtttttctgttcgaggtaaaacaatgcgaacgaagcattcagccgtccttgcaagaacgcgcctttccagcctacctcatagtttgtgccgaccaaaggcggtaaaacggttttggcactgacatcgacattatcctgctgtttgaagattttggtataacttccgtaaatactctgttgcggtgtcaagtcataggtaatgcctgcatagggcgtcaatttatgaccttgcatcttggccgtgtaatggtcctgatccgccctaatgctcgatgccgtctgaaaatcgcttgccggctgcccatagcggacaggcatatctttggtttgcgaagtctcatagcgcgtgtagtgcagcccgcccaaaaggtgcagtcggccggttacgttgaaacgcgtgctggcagtcagcgaatgggttttgttggtgttgaggtatttggcgtagttatacagcgcaggaacatggtcgtctgccactttgacggttttccaaaccggcaccgtaccggaaaaaccggtaaaggcaggcgtgccgtcgggattggtctcctgaatcttgttgcctttttcgtccagctcatatacatcgacatataccggtgtccggctgccgctgtattcgtcatagtaatacacctgcttgccttcggcatcgagcttgggctcggtttttattttcttggcgttcctgcattcttcggcataaacggtacggttgcctttttcatcgtacgcctgccaatcgggttctttatgccccctgaccaaaggagacgacaaatcgccgtccggctcctcctgacaacttcccgcatacacgccgtgcgttgcccccgtattcggacgtactctgtagcggcgttcgtagatttctagatattccgaacgtatcttttcatcaccgtaggcatagccgacaaagaaatcatgctcccgcccgaacagcccatatgtgccggtcaggtcaagtttaattccccattggcggtcgtctttggtatgccgcaacggcatataactgtatcgtcggttggcggtagccttccgattaaaggaagagtcatacaggctgtttggaaaacgttgtgccgcattattaaagatgccctccttcgcaagggctttatcgacaaattccgccttgtcggcatcaacgcccggatccccccaagaaccttgacagataaagtccagcgcgaaagggtcactcatacacttgtcaaaaccggctttgcgttctgcggcacggcggctgcgatactgttcgaaagcagtattatcgaaacggtttttaacaaaatcgtctttgcgctcccggtattccttggcggtttcatcacgatatgctttcagtttctccaatgccttatctttcggctcgaacgggatgacttcgtttttttcagtcaaaaagcctaccgcatcctcacccgacaaacccgccgcatattcgtttttcagaaaaaactgccccaccttcgcatcggattcattcttggtataagacacttcggcattgagctgccaaccgttgtcaaacacatgtttgaatcctgagaaaaggttgtatttgtcggcacttaaccgcgaccaatcctcccccaaataagtgttgcgcggcagttgcaaaggccggttgcaggcaggcgttgaactgaacggggcagttttctgattttcacagggcaaaataatgcccgaaaaatcaggaacctccctactcttctgatacatgccgcccaaagtaagcacactgctgtcgcccgcatcggcttcggcaatgccgtaaaccatatgtttcctgccccaaactcggtctttaaacgattttttatactcttccgcacccaccaaccttccgcgtaaggtattcgccttattcaggctgcctgaaacatccaacactgcacgccggctgccgcgatggtcggcggtcagctctccggtatgtttgaaagaagcggtaggtcacttacggatcaaattgacggttcctcccggctctgaattggattgggtcaaccccgttgcaccccgtacaacttcaatatggtcataaaccgccaaatcggtactcggagacacgtcgattttcgccgtatatcccgaacggcctgcaacattgacggtcataccgtcttcaccaatctgatcaatatagaaaccgcgtgacaaaaaccgcgtctgcaagcctgaatcgcgcacaacgttgacacccgtcgtgtttttcattgcctcttcaagcgtatgcaccgccttatcgtcaaggcggctgcgcgtgatgacgctgaccgactgcggcgtatccttgcccgcaatcctcatacctgtggcggtggacatccgatctatcgtataagaacgggtcttttcggtcttgcccaacaaagcatgagagccgcgtacattgaccgtatccagactgacggtattgccgtctgaaacaggcacaacaccgtctgcaaaagaaccaccgtaagccgataacagcataacggtcagaattttaagtgaaaaatgattttgattcatagagacctctgtaatatgcaagtgtgcaaatcgtccaaaggctctcacaactgttttgattttttatattaattgaaaaaaagtaattctcaattaaatttatagataggattgtattcccattttgacaaaaaacaaactactccttaccgtttatttcaaaaaacgataacattgtattgaaaaatatccgaatttaaatacagaccgccaatgcagaaaaaaacacccaaattggctataatcccgacaaacacactcaaggacaacaacatggcagcctcgcccgaagcaaaattcaccgaagaaaagattttgtgggtcaaacaccacacgccgaaactcatcactttcgccatcagccgtcccgaatcctaccgctttaaagccggacagttctcccgactcggtttctacgaaggggaaggtttcatttggcgtgcctattccattgtttccgcagaatatgccgacacgctcgaatattttgccgtactcatccaagacggccccatgtcggcccgtttcgccaaaatgcaacagggcaacaccatcctgctcgataaaaatgccaccggcttcctcctgcccgaacgcttccccgacggcaaggatttggtgatgctctgcaccggctcgggcatcgcccccttcctttccattctcgaacaacccgaaatccgtcaacgtttcgataccgtcaacctgatacattccgtatcttttcccgaagaattgattttcaacgaccgactcgccgcattgactgaacatcccctggtaggcgaatacggacactctttccgtttcgtccctgttaccacccgtgccgccaacccctcgggcttaagcggaaaacgcattccggaactcttaaaaaacaacagcatcgaacaggcgctgcataccaagttcaccccggaatccacacggtttatgatttgcggcaacccggaaatggtcaaagacactttccaaacgctgctcgacatgggttacgccatgcaccgcaaccgcattcccggtcaaatcatgatggaaaacggcttctaaaaaccaccctgcttgtccgatgccttcggatggacgggcaaaccgacacggcacgaaaaccgcgtcggcaaaaatgccgtctgaaaaaattcagacggcatcttcggatacattacctgcaaacggcaacacaccggcacaaaccgattaggcaatcaacacggtgacggctgtttacatacttgccggctttcaccaaccgatatcgatttaaccgatttccttaatatttttcctgtccgttttaaacttcgccttaaacgcatccggtaaatctttatcgaaataccaaagcccgtcatccatttccaatgcgccgcccattccgtgcagaacgactttttcccccgtcaaaggatcggtttcggtaatttccacctcatgcatttttccccaatccaaaacaggcaacttgtgtgcaaacgccaaaacctgttcgtcagaacggccgcacgccttatcgcatcggcctgaaacatatacgggacaaggctcatcctctgcataaccgtccggaaggataccggctgcggcaggacacaatccgtatgtttccgcccacgacgacaaagcccgtctcgctgcctttttattggcaaataatccggtaggcggattatccgtcacaccgtttttcaaagccgctgttttcgcattcaacatgccgtctgaacctttttcaaacctgacggtcgtaaatgttttaagcagatttttggcagacacataacaatccgaatgataacgcccgaccaattccgctttaatcttatatgcatgcaggctgcccaatgcgggaaaaaaacggacttcctccgtattgcaccaatcaaacggggcttttccggagtccaataaagccgaaatctcgctatatacccgttcaaacgtaccgatataatttactttccctccgccgtcgaaacaagccagcacccccataccgtcaggcaaaccgtacaactgttccctcaaccgttcgggcagcgcggcaggcagcggtttcggattcatcaaacggaaacactgcctgatccatgcctcaaccccgtgttccgacagactgtattccaaataatcacacaatgccgatacatccgccatcgcacgatgcctgtcttccacaacaatccccaacctttcgatgatactgtccaggctgtgcttgtaaaattgcggatacagacaccgggacagctgcacactgcacaaagcaggcgatgaaaatccgatacccgcacgatgaaactcatgctttaaaaacgtatagtcgaaacggctgttatgtgcaaccagcacacaacccttcaataccgaaaacaactcgccggcaatctctgcaaaaacaggcgcatcggcaaccatgccgtctgaaatccccgtcagccccgccacaaactgcggaatcggtttttgaggattaaccaaccactcatgcctcaccacccttccctgctcaaacttgaccaaagccacttcggttaccctgtcttcatacagattgccgcccgtcgattccaaatcaaccacggcaacaggcattccaaaccgtaaaaataccttttccagcaagggccagcgagaagcaacaatcattttattctctttaaattcaaacaacaaaccaatattttacacttttaaggcatttcatccaacaaaacaattgacagaatccgatgattaccctaaaattcgaatctttcttgcagcgcacccgtagctcagttggatagagtatctggctacgaaccagagggtcgggcgttcgaatcgctccgggtgcgccagtaagaaaatacaatatgcgcccatcgtctagcggttaggacatcgccctttcacggcggtaaccggggttcgattccccgtgggcgtgccaaattctaaatccccgagattatcgctcggggattttttattgtctcagcaactcgttaccatatctttacctacccccttcatcagaatctcagacgtaatcgaatcatattcaaacctttgccgtgcaaaccgatatcccataaccggatgcggtgtccgtccaacattttacccgattgaaacgcctgatatattgcaccccatcaacgtggcattacttttcttaacaatcccctttgacagcaactgactagggcttttttatgccatcatcaaatttatagtggattaactttaaaccagtacggcgttgcctcgccttgccgtactatttgtactgtctgcggcttcgtcgccttgtcctgatttttgttaattcactataatattttctctcccgattgaaacaggcgtaacagaatgcccgaagctccggctgctttcttgtttaccgccgcgatatttagagtataataccaaatttgagcaatagttctaaaacagttagaaccatttttcatgagcctgactgattcgtacactcggagaaactgatgcagaatatttttgaccctttggttattcgtggaaaatcccttacccccatcgtgcaaggcggtatgggggtcggtgtttccgcatcgggtttatccagcgcggtggcgcgtgaaaacggtatcggaacgattgccagtgtggatttgcgccaccttcacgaagacctactcgccgaatcacaaatcaatccgagtgaagagaaatatacatctttgaactgtaccgcattagacagggaaatccaaaaagccaaaagcgcttcagagggaaaaggactgattgcggtcaacgtgatgaaggcggtcaaagaccacgccgcatatgtccgccaggcttgcgaatcaggggcggatgcggttgtaatgggtgccggcctgcctttagacctgccggaaatgaccgagggctatcataaagatgtcgcgctgctgccgattctgtccgaatcgcgcggtattaatatcgtcttgaaacgttggatgaaaaaaggcatattgcccgatgcgattgtagtcgaacatcctgcccacgcggccggacatttgggtgcatcaaccgttgaaggcgtaaacgatgccaagttcgacttcaaacgcgtgattgaggaaacgtttgaagttttcaaaagtttagggctggaaagcgaaaaaatcccgcttattcttgcgggaggcatggcaaattttgaaaaagtcaaaaccgccctaaagaactggggagcatccgccgttcaaatcggtacggcttttgccgttaccgaagaaggagatgcacaccttaacttcaaaaaaacgctcgccggtgcggaaactgaaaaagtagtcgaatttatgtctgttgccggtttgccggcgcgcggtgtccgcaccaaattcctagacagctacatcaagcgtgaaagcaaacttcagacaaacgccaaagccgacccgcgccgctgtacccaaggtttaaactgcctaaccagttgcggtctgcgcgacgggctttccaaagcaggacagttctgtattgatatccagcttgccgccgcattccgtggagaagtagataaaggcctgttcttcagaggtaaagaccgctgcccttcggcaatgccatccgcaccgtccgcgagacgatacaatatctgctgacggggagcgaacctgttgcaacgctcggacgctgacatcaggtaggatttgatttgcaaacaaaatgccgtctgaagggctttcagacggcgtttttcaggctgcgttccggaatagtgttaaaaaataaacgggatgagatacatttattttcgtccgacaaatcaaaccatcgcgccgaatgatcaaataatgcctgcacggcattacatctggcaaagcaatgcaatgaaaacacggcttttttatttgctttcagtattattgaaaagcttgtccatcggggtcaaatcgaccgcattgccttggctggtaatccatttgttctcgacgcgccacacgcctgccgcgtcctccacgcgcacataccagtggttggtcggcgaaagggttttgaacaccgcctcatattccgccctgccgttctgcgcgctgccgacgggcttgagggcgacggtttgatcgtccgccttgcgggtcgggtgcatcagcagcaggttcaaaggctgtttgccgtcaaactcgccgccgacaaacacttttgccgcattcatatcgggggaaatgagaacctgcaccccgatatgccgtctgacggcttcttcatcccgatgaagctggatgtcgatatgtttgccgtctttataataatcgtccgtaaccaaatctgtcgcgtgctgctgcgcgacaaaaaacatagcgacgctggcgatgacgacaaaaatcggccccgccatcaagatccacggccagacgtgtttgtaccaaggtttgattggagtgttttgagacacggttattctccgataaaggttgcatcttcttccaagacgaccggcttgccgtcgggcgcgccgctttcgcggtattggaaggtaaattcgatagggtggctgcctttgtccgcgtattccggaatggtggacacttggacgggaagggttaccgtttcgcgcggggcaaccttgataccgccttcgggcagcccggtcagggcgatttcgtcaaagcctttgacacttgcggtaatcagctgttctttttcacttttgttgatgatacgcaggctgtatgcgttttccagccagcctttggcgttttcgcgcaccagtacgccacggtctttcaaaatatcgacctcgaccattttgcgcgtggacaaaccggccaggaaggcaatgataactaacgccaacaccgcgccgtaacctgccacgcgcggtctgagcagccgttttttaatgtctttttcagaatattcgtgttccagcgcgctttcggtcgtataacggattaatccgcgcggatagcccattttgtccataatctcatcgcacgcgtcgatacaggcggcgcagccgatacattggtattgcagaccgttgcggatgtcgatgccgacggggcagacttggacgcacatcgcacagttgatgcagtcgcccaaacccgcctcttccttattgaccgttttcttgcgcgcgccgcgcggttcgccgcgttccgcgtcataagaaacaatcagcgtgtccttgtcgaacatcgcgctttggaaacgtgcatacggacacatatgcaggcatactttttcacgcataatgtgggcgaagaagaaggtcataaagccataaaacgctgcggcaaacatcgcgccgccacctgctgctccagtgaataaatcgggaacgaactggcggatagggacaaaccagcctgcaaacgtgatgcccgtccacgcgcagacaaggaaaatcagcaggtatttggtggctttgatgcggattttagtgaaattccacggcgatttttccagtttcagccgtttgtttctatcgccttcgaccaggttgtcaatccacagcataatttcggtgtaaaccgtttgcgggcaggaatagccgcaccacagtcgccctgcaatcgtcgtccaccaaaacagcccgaaggcgcaaatcatcagcagcaaggcaaggtaaatcaaatcgcccacccccaacgacaatccgaaaatgaagaaatgccgttcggggatattgaaaacgacggcctgcctgccgctccagttgaaccacggaatgacgtaaaacacaaactgcgtcgccaatacggcggcgatacgcagtttggcgaaccgtccttccgcctttttgggatggatgcgttcgccttcgggatggatttgaatcacgctggctcgcggatcgaatgttttttttgctttcggcgcggcttttgtttgttcggacgtgccgattccggatgccggactgccggcttggttttccgtggtcattctgcattccttagatttttgattgatggtttgcccgttaccgccgccgtttgcttttcagacgtcatttttcttgttttttaaggcgttgtgtttcaagttttgagaaaatccgtttttcccaaaatatatttccgctattgtacaactttatgcgccgtccggatgtatggggcggatacatttcccatccgcatcaaaacgcctggattttaccttaccgcccgaacaaaatccgaatacggttaaaaaaaaagactaaaaaaaccgacacccccatatcggcagaaccgacggcgcaagctcataaacaaacgctatcgacaatccggcacacaatctataactttttatttcaaaaggaataatggcaggcttcgcccgcaaatcgaaaatccttccccgcctgtcccctgccgccgccttcccacgcgtccgcccttttcttgaaagcataagcgaatcgggcgataatcaacgctttccgattatccacttatctgaaacaccagcaaggaaaatacaaaatgtctcaactggcaaacgcaatccgcttcctctcggccgatgccgttcaaaaagccaattccggccaccccggcgcgcctatgggtatggcggaaatggcggaaacattgtggacgaaattcctcaatcacaaccccgccaaccccaaattctacaaccgcgaccgcttcgtcctctccaacggccacgcgtctatgctgttgtacagcctgctgcacctgaccggctacaacctaagcattgaagacttgaaaaacttccgccaactgcacagcaaaacccccggccatcccgaatacggctacaccgacggcgtggaaaccacgaccggcccgttggggcaagggattgccaacgcggtgggtatggcattggcagaaaaaatccttgccgccgaatttaataaagacggtttgaacatcgtcgatcattacacctacgtctttatgggcgacggctgtctgatggaaggcgtatcgcacgaagcctgttcgctcgccggcaccttgggcttgggcaaactgattgttttatatgatgacaacaatatttccattgatggtaaagtggacggctggtttaccgaaaacatcccgcaacgctttgaaagctacggctggcacgtcgttcccaatgtaaacggtcatgacaccgccgccattcaagccgccatcgaagccgcacgtgccgaaaccggcaaaccgtccatcatctgctgcaaaaccttaatcggcaaaggcagtgccaacaaagaaggcagccacaaaacccacggcgcacctttgggcgcggacgaaatcgaagccacgcgcaaacatttgggctggacttaccccgcctttgaaatcccgcaagaaatttacgatgcgtggaatgccaaagaacaaggcgcgaaactggaagccgactggaacgaactgttcgcgcaatatcaagccaaatatcctgccgaagccgcagaatttgtgcgccgtatggataaaaagctgccggacaatttcgatgaatacgttcaagccgcattgaaagaagtgtgcgccaaagccgaaaccatcgccacccgcaaagccagccaaaacagcatcgaaatcttggcaaaagagttgcctgaattggtaggcggttctgccgacctgaccccgtccaatctgaccgactggtcaaacagcgtctccgttacccgcgacaaaggcggcaactacatccactacggcgtgcgcgagttcggcatgggtgcgattatgaacggtttggtattgcacggcggcgtaaaacccttcggcgcgactttcctgatgttcagcgaatacgagcgcaatgccctgcgtatggctgcgttgatgaaaatcaaccctgtatttgtgtttacccacgattccatcggtttgggcgaagacggcccgacccatcaaccgattgagcaaaccgccaccctgcgcctgattccgaatatggacgtatggcggccgtgcgacaccgccgaatccttggtggcttgggcagaagccgtcaaagccgccgatcacccgtcctgcctgattttcagccgtcaaaacctgaaattccaagcgcgcagcgagcaacaactgaacgacatcaaacgcggcggctacgtcatcagcgaagcccaaggcaacgcccaagccgtcatcattgccaccggctcagaagtcgagctggctttggaagcgcaaaaagccctcgccgcgcaaaacatcgccgtgcgcgtcgtttccatgccgtccaccaacgtattcgaccgccaagacgccgcctatcaagccgccgtcctgcccgaaggcctgccgcgcatcgccgtagaagccggacacgccgacggctggtacaaatatgtcggactgaacggcgcagtcgtcggcatcaaccgcttcggcgaatccgcccctgccgatttactcttcaaagcattcggctttaccgtggacaatgtggttgatacggtgaaatccgtgctgtaaccccacacctaaacaaatgccgtctgaaaccaattagggcttcagacggcatttttatattctcgcggccatgatgctttctcatcccaccaatctccattataatatttgcgaatcactcttattcacatttcaaaaggagaaacgcatgagcacccgtaccgaacacgacacgatgggcaatgtcgaagtcccatccgaagcctattggggcgcgcagacccagcgcagccgcaacaatttcaaaatcggtggcgaaaccctgccgcagccgttgatttatgctttggcattggtgaaaaaagccgccgctgccaccaatgtttccctcggtaggattaagcctgaacaggcggatttgattacgcaggcggcggatgatgtgttgagcggcaagctcgacgggcagttcccattggtagtgtggcagaccggttccggcacgcagtccaatatgaacatgaacgaagtgctggcaaaccgcgccaacgaaatcgccggtacgggtttggcggcttatcagcccgtccatcccaacgaccatgtgaaccacgcgcaatcgaccaacgacgcattcccgaccgctatccacgttgccgccgcgattgaaatcaaccgccacctcatccccgccgtaaaagccctgcgcgacacgttggacaaaaaagcccaagctttcgcccctatcgtcaaaatcggccgcacccacttgcaagacgcgacgccgctgactttgggacaggaattttccggctacgtttcccagcttgatcacggtttaggccgtctgaacgatgcgcttaaagacttgtatgaacttgctttgggcggtacggcggtcggcacgggtttgaacagccatcccgaatacgccgaaaaagccgccgccaaactcgccgaattgtccggcttgccgtttgtcagcgcgccgaacaaatttgaagccctgggcggacgcgatgccgccgttgccgcttcgggcgcattgaaaacgctggcggcaagcctgaacaaaattgccaacgacatccgttggctggcaagcggcccgcgttgcggtttgggcgaaatcaaaatccccgaaaacgagccgggttcgtccattatgccgggcaaagtcaacccgacccaatgcgaagcaatgacgatggtgtgctgccaagtgttcggcaacgacgttaccatcggtatggcgggcgcgtcgggcaatttcgagctgaacgtctatatgcccgttatcgcctacaacctcttgcaatccatccacctgttgggcgacgcgtgcaacagcttcaacgaacactgcgccatcggcatcgaacccgtgccggaaaaaatcgactatttcctgcaccattccctgatgctggttaccgcattaaaccgtaaaatcggttacgaaaacgccgccaaagtcgccaaaaccgcctacaaaaacaacaaatcgttgcgcgaaaccgccgttgagttgggcttgctgacgggcgaagaatttgacgaactggtcgttcctgccgatatggttcatccgcgctaatccttccctcaaataaaatgccgtctgaaacctcgttcggacggcattttccgttgcctgcaaactagcggcgtttgaacagcctgtcccccaccgccgccgtaaccgcacccccgaccacgatcagtgcgcctgcataacccaaaccgttcatatccggcgcggcaaaagtatcaggcatcacataatgcccgagcaaagaaaatattacggtaaacacggggagcaaggttgttaccgcgctgactttggaagcctcccaatgtttcaacgcctcgccgaacgagccgtaaccgattaacgtattcaagcagcaatacgcaaaacaaacccacgccaacgtaccgtccaaacttccgatgtgtgccggttcggcaaacggcaggaacacggcggcacttgccgcataaatcaacagcagaatctgttgcggcccgaattgcgccgacagcagcttttgcgccacggcataacacacccatgccatactgcctgccgcacacagcaacacgcccttcgcatacgcgcccaaacccgacaactcgccgaatttatcgttaaaaaacataagcaaaccggcaagcagcaaaaccaagccgattttctgagcggcagtcatccggtctttaaacaccaacacaccgacaacaatcatcgtaaacggcgaaatctgccacaaaacctgcgtcgtggtcggcgaaatataatgcagcccttgggcaatcagcacaaagtttgccgaaatgcccgccacgccgagcagcagcagcctgaatgagcaccaagaaaaatcccgccgcttcggcagccgcccgcccagtgccagcaaaacaaacaataccgccgccgccacggtaaaacgcacccacaccagcgtcggcgcatcgacaaacttcaatacctgccgcacggcaatcggcagcgttccccacgtcatcgccgccaaaagtgccaacgcgaagcctaggagcggcctttggttttccatcctgattttcctatttttaaacaaccgtattgccggacgatgccggtttgccgcatcgggcaatgatggttcaagcgtttggcgtttgattccaaccctttgatttcaaacaaaccggctgaagctcggctattgcttcgcgctatttgaaaacaccgcctgaattttaaaatatagtggattaacaaaaaccagtacagcgttgcctcgccttagctcaaagagaacgattctctaaggtgctcaagcaccaagtgaatcggttccgtactatttgtactgtctgcggcttcgtcgccttgtcctgatttttgttaatccactataccgtctgaaaacagcggggacgtgcggcaggcatcactgcctcaaaacgcccgaacggcgcaatcgcaacgttccgcccaacgcaaagggcggcaacaagccggcccaaatgcaaaaaagagaaaccctgccccgtaaggtttaaggtttctccgtcctttatgatttccctccgcgaggatgtccggccgtaaaattcagaacgggatatcgtcgtcaatgtcctcgaccggggcggcggcaggcacgggttggcggcgcggcgcggctggtgcttcttggggatgggacggcgcgtcggaggcgggctgccggctttgctgcgcggggcgttggtaagcctcctgactctgaccgtaaccttcctcgtaaggcgcaccgccgctgttttcattgcgcccgcccaacattttcatttcgttggcgacaatatcgtaagcggtgcgttcgatgccgtctttgccttggtatttgcggctttggattctgccttccaaataaaccagcccgccttttttgaggtattgcccggcaatttccgccagtttgcggtacatggtgatgttgtgccactcagtacgctctacacgttggccgttgcggtcgttccaagtttcgctggtggcgacgctgaaattacaaaccgcctcgccgttgggcatatagcgcacttcgggatcgcgtccgaggcggccgatgaggatgactttgttcaatgacattttttaaactcctgtgatgattttttcagcggcagcctgatcgaaacccttctgcaacactttgagatagacggtctgcccgtcgaaactgaaaccgatgtcttccacaccctcaagctccgacaaggcgcggtataacccttcctgattgccctgccacacgccgccgacagggtaactgaggtttttgacgggcttgggcgcaggcgataaaacggcaattaccagccacagcagcatcaatatactgcaaaaggcaaacacgccggaaaagccgtatttttgaaacagcaaaccgcctgccgcgccgccggcaaacagtccgagcgactgcatcgtgttgtacacgcccatcgccgtacccttcaggtcggacggcgcgattttggaaaccatagacggcaggctcgcttccaacacattaaaaccgataaagtaaacaaccaaataagcggtaatcaagcctaccgagcgcataccggacagcaaaccgagctgcgccgccgcaatacagacgatacccaaaacaaaaacctgcttaagcttgttgcgcgtctcgccgacgataatcagcggaaccatcaccaccaagcccgtaatggtcgaaggcagatagactttccaatgctgtattttttccaaaccgagctgggtcatcgcgaaaggcagcgcggtaaacaatgccatttgtgcggcgtgcagggcgaaaatgccgaaatcaagcgtcagcagcctacggtttttcaaaacttcgcctatgcgcgaaggctgcgcctgcgtatcttcgtgcagcttggaaacttcgggatcgggagtcatccacgccaccacgccgatgctgatgacggtcagaatgccggtcagcataaacagtccgcgaacgccgaccgcgtcggcaatcacgggggcaacgacgaggctgaccgaaaacgtcaaaccgatactcaaaccgatcatcgccattgcgcgggtacgtacgccgtcgcgcgtcaaatccgccagcagcgcggtaaccgccgcactgaccgcccctgcaccctgtatggcgcgtgcggcgaccagcatgggcagcgtatcggcggcggcggcaagaaagctgcccgccgcaaacacgaccagtcccgcataaatggttttcttgcgcccgaacttgtcggaagcgatgcccaaaggcagttgcagcagagcctgtgtcagcccgtaaatgcccattgccagcccgaccagcgttttgttgccttccgcgccgggcagcgaggcggcatacaccgccaatacgggcagcacgaggaacatacccagcatacgcagcgcgtacacgccggaaagcgtcgtactggcgcgccattcgtgcggaaacatttggatgcggttgtctcttgccatcatattttttcagacggcatcaacagttgcaatgccgtctgaacttccagtgaacagattttcggattatacaggattcgccgtatttcggttgcggcgcgggttcaaaatcaacgccactgccagcggttgcgccacgcgcccaaaacggcgttcggatatttattgctgcccaagctgccgttaaagcgggcaagcgcgcggacgatgttgcctttttcaagattccggtaatggcgcaggatggtacagccgtaacgcaggttggtgcggatgtcgaacaggttgtgcgccggtttgccgatgtagtttttccaaaacggcataacctgcatcaggccgcgcgcgccgacaccgctgattgcatactggcggaacgcgctttccacctcaatcagccccaacacaatctgcgtatccaaaccggcccggctgctttcgtactggatattgaccagcagcctgcgccgctcctcctcctcggggacgaaccttgccaaacgtgccgacatggcagacaaccaacgctcgccctctttcggattgtcaaacaccagcctcggcggattgacgctgccgacagaactcctcatcacggaagccacatcgtcggcaagcgtttcctcacgttgcgcgccggcgtgcgccagaggactgagcaacaacgcaccggcggcacacaacaggcggcggcgttgcagattaacgggtagggtatcggtcggttttctcatagggaacgggggcgcgtccggacgtttcagacggcattaaatattcaaacagacataattgctttcaacgcgaaaaaccgcgcgcaaaatccaagcgcggcatatcgccctgcccttttcgggcaaacctcaattctaccgccctcaagaacgcttgtccaaacaggcacaggcaacaccgcccgggcatttccgttttcaccggttatccgtcgtccggattatgcagcagcaccatcagcgcatcacgcttttcgggcggcagcaggcggaaatatagtagattaaatttaaaccagtacagcgttgcctcgccttgccgtactgatttaaatttaatccactatatcttgaggcctttgcaaaattcctttccctcccgacagccgaaacccaaacacaggttttcggctgttttcgccccagatacctcctaattttacccaaatacccctttaatcctgcccggacacctgataatcaggcatccggggcaccttttaggcggcagcgggcgcacttagcctgttggcggctttcaaaaggttcaaacacatcgccttcagatggctttgcgcactcactttaatcagtccgaaataggctgcccgggcgtagcggaatttacggtgcagcgtaccgaagctctgttcgaccacatatagtggattaacaaaaaccagtacggcgttgcctcgccttagctcaaagagaacgattctctaaggtgctgaagcaccaagtgaatcggttccgtactatttgtactgtctgcggcttcgtcgccttgtcctgatttaaatttaatccactataacgggttttcgacaaatatcggttgcgtttggtttgcgcctccgtcagcggacggttgcggcaggctttgcgcataatgccgttctgcaaccgatgctctttcagttttccgtaggtcggattctcgaatccgacattacttcaatcgtatccaatagaaaagtccgcattgccgccaccccaattatgcggataaataccctgtttgacataacggtgaaacgtagaaaacccccaatcggaaatttgtcctacatagccatgtttgaccggattgaaatgcagataatcaaaatgccaggcaaaatcggcctcatcgcggatagtatattcccaaaagcgtttttgccaaagcctgagattgccgccgattaaatattggctgtgccgcttgatttgccgccagcgttccgaataagcagaatcattgtccggcagccgccatatggtatgcagatggtcgggcatcaacacccatgccaaaatttcaaacggataccgttcgcgcaccgccattaccgcctgccgtaaagccaaacgcaccgcatcatcggtcaaaatcttctgccgtttattggttacaaccgtaaaaaagtaagtgccgccattgcggtaaaaacgacggtatttcatagtattatgctcggaatgattttgtaggtcggattcttgaattcgacattttgggcattgctgcaatggattgcaatgatgggaatgttaaaggttttgtcggatacaagtatccgacctacgcttgctgaaccgtcattcccacgaaagtgggaatctagaatctcggggtttcagtcatttccgatagattcccgccgcgtcagggggtctggattcccgcctgcgcgggaatgacgggtttcaagattgcagtgttgtcgggaatgacgggtttcaagattgcggtgttgtcgggaatgacgaatccatccatacggaaacctgcaccacgtcattcccacggaagtgggaatctagaatcccggggtttcagtcatttccgatagattcccgccgcgtcgggggtctagattcccgcctgcgcgggaatgacgggtttcgagattgcggtgttgtcggaacgcaactgaaccgtcattcccacgacagtgggaatctagaatctcgggggttcagtcatttccgatagattcccgccgcgtcagggggtctagattcccgcctgcgcgggaatgatgggtttcaagattgcggtattgtcgggaatgacgaatccatccatacggaaacctgcaccacgtcattcccacgaaagtgggaatctagaatcccggggtttcagtcatttccgatagattcccgccgcgtcagggagtctggattcccgcctgcgcgggaatgacgaatttcgagattgcggtattatcgggaatgacgaatttcgagattgcggtattgtcgggaatggcgggtttcaagattacggtgttgtcgggaatgacggttcgggtatttccacgcccgccccgcgcctgtaaacggcaggtgaatcaaaaatgccgtctgaaggttcagacggcatcggtgtcggggaatcagaagtggtagcgcatgcccaatgagacttcgtgggttttgaagcgggtgttttccaagcgtccccagttgtggtaacggtatccggtgtctaaagtcagcttgggtgtgatgtcgaaaccgacaccggcgatgacaccaagacctaagctgctgatactgttgctttcgtgataggcaggtttgttggtcggaccttgtacgattttgcctggcactgtagcgccttgcgctggtggactgaaagtagtcgtggtttcttttctcaccgaatgaacctgatgtttaacgtgtccgtaggcgacgcgcgcaccgatatagggtttgaatttatcgaatttatcgttgagtttgaaatcgtaaatggcggataagccgagagaagaagcggcgtggaatgtaccgttttcctgattttccgtcttcagttcttgccagatgccactgctattgtttttttgcaactcttttgtgtttacggaatatttattgttgttccattttctgtaactggcataatctgccgctatcctccagccgccgaaatcgtagccgaccgacacccgggggtggatggaatgcgcacggatgtttctgaaataatcgcttactgtgcttgtgttgtttgcaccggttgctttcggataatcgtgggtaatgcgttcggcggcataagctaaatccgcctgcacataatacgggctgcggctgccgtcttcacttgccgcctgcgctgcggaagagaagagaagagaagagaagagaagagaagagaagagaagagaagagaagagaagagaagagaaggttttttgggggctggattcattttcggctccgtattcggttttaactgattaaaaagaaagattttcaatgatgttgcaggagcggactatatcaggtttgtggcgatgtttcaacacaatatagcggatgaacaaaaaagagaacgattctctaaggtgctgaagcaccaagtgaatcggttccgtactatttgtactgtctgcggcttcgttgccttgtcctgatttttgttaatccgctataaacaacgcttcgtccgaaaaaacgattgaatttgcgggcagaagctggacgaaaaccgccgacagcctgccgcaaaaggcacacggtttgcgctagggcttaggcgtgtcgcgcgaaatcaatgcgggcaggcatcatttcctctacggcggcatcagcggcggcggcgtgcattattgggataacaaagatttcagcgaacagagcctgcgcctgtcgttcggctataaaaaccgttcggtaacgcgctcgttcggcatcgtgccgtttgtcgagcaaaacctcttaggcggcagccgatacaatttcgtcggcggcttcaatgccgatttctcccaacgcttgagcgaacgctggcggttgacactaaacgcgggcaatatgtggaagcattatcaggaagaccgcaccgccgcccgatacgacagccatatgccgctggcgggcgcgacgctgatgtattccgcgccgaaagactggctgctttacggcggtgcggactggtcgcacaacataacgaaagaggcggaacaggcttccatccgcaagggtttgcgtgtcggcgcggtcaaaacgttcgacggcggcttgggtctgcgggcaaacctgcgctatacccgcaggatgtttgacgcacccgggaccattgtgtaccgcttcccgcgcaaagaccacgaatatcaggcaaacctgtcgttgtggcatgacaaaatctcttggaagggctttacgccgcaactcaatttccgctatctgaaaatcgacagcaatatgaaaagtttttacacacgcaaaaacatgcagattttcatgagcgtggaaaaggatttcaaataagcgcaaaaaatgccgtcggcaacatccgtgggcagaatcaaaaaccgccgcatcatttattgtcaacgcctgcgccgtcagagtaacattgcgtttttcccccaccggtatccgccatgaccaccacccccgcaaacgtcctcgcctccgtcgatttgggttccaacagtttccgcctccagatttgcgaaaacaacaacggacaattaaaagtcatcgattcgttcaaacagatggtgcgcttcgccgccggactggacgaacagaaaaatctgagtgccgcttcccaagaacaggctttggactgtctggcaaaattcggcgaacgcctgcgcggcttccgccctgaacaggtacgcgccgtggcaaccaacacattccgcgttgccaaaaacatcgcagatttccttcccaaagccgaagcggcattgggtttccccatcgaaatcatcgccgggcgcgaagaggcgcggctgatttataccggcgtgatccacaccctccccccgggcggcggcaaaatgctggttatcgacatcggcggcggttcgacagaatttgtcatcggctcgacgctgaatcccgacattaccgaaagcctgcccttgggctgcgtaacctacagcctgcgcttcttccaaaacaaaatcaccgccaaagacttccaatctgccatttccgccgcccgcaacgaaatccagcgtatcagcaaaaatatgaggcgcgaaggttgggatttcgccgtcggcacatcgggttcggcaaaatccatccgcgacgtgcttgccgccgaaatgccccaagaggcggacattacctacaaaggcatgcgcgccctcgccgaacgcatcatcgaagccggttcggtcaaaaaagccaaatttgaaaacctgaaaccggaacgcatcgaagtttttgccggcggacttgccgtgatgatggcggcgtttgaggaaatgaaactcgacaggatgaccgtaaccgaagccgccctgcgcgacggcgtgttttacgatttgatcgggcgcggtttaaacgaagatatgcgcggacaaacggttgccgagttccaacaccgctaccacgtcagcctcaatcaggcgaaacgcaccgccgagaccgcgcaaacctttatggacagcctctgccacgctaaaaacgttacagttcaagagcttgccttgtggcaacagtatctcggacgcgccgccgcgctgcacgaaatcggtttggacatcgcccacaccggctatcacaagcattccgcctacatcctcgaaaacgccgatatgccgggtttctcacgcaaagaacagaccatacttgcccaactggtcatcggtcatcgcggcgatatgaaaaaaatgagcggcatcatcggcaccaacgaaatgttgtggtatgccgttttgtccctgcgccttgccgcactgttctgccgttcgcgccaagacctgtctttcccgaaaaatatgcagttgcgcacggatacggaaagctgcggcttcatcctgcgtattgacagggaatggctggaacgccatcccctgattgccgacgcattggaatatgaaagcgtccaatggcaaaaaatcaatatgccgttcaaagtcgaggccgtctgaaccttgcggaacaaatgccgtccaaaccctgtccagacggcatttgcctgtccgcaacatcccgatatgcgcggcacatctgctcggaacggtcatgcaggcgtaaaaaacaaggggcacataacccaaaaaccgcctgaaaatcttcaggcggtttcgtttgggttgccggcaggcggcatcccatcatttttgccaaggcaacaaattatttggcggcatctttcattttgtctgccgcttcctgagtcgcgtcggcagctttgttcaaagtatctttagctgcttcagttacagcttctttggcttcagttacagcttcctcggcacttgcctttgcatcagccgcagcatctttgacttggtctttcgcttcttcgacggcagaagcggcagactcggcggcagaagccgcagtgtctttaacatcggactcaacggcttgaaccgcttccttaacctcctgtttggcttcttgcgaacaagctgccaaggcagccgccatcattgcggcaatcaataattttttcatgtcttatccttcttgagttgttgattaaggttttgcttaaaaatcggaccgtgttccatcaatcggctgattttgcccatcgaccggagagaaaacggtttcccgtttagttaaaacccattatatttaaatataaaggtttttttctcgaacaataaggcggcatcaatgccatattgaaacacgtccgaaaactattttatgaaaacagttcggaaaattgtaacacatatccccctccttttgagtttcccgacggtgcggactttttcctgcagggtttgaaaaacccaaatatattccgggatgtccgaatacctcaataatggcggcggcggaaataaaacgccccttcgctgtcgatttccagcacatagcgtccgttctgcacggcggcatagccgcttttgcctgcctgatagggttgcagggcggcatgcgaaactaggtaatccgtcagtttgccgccgtcttcggcgatattgcccaccagtttggcaaacaaggtatggcacacgccgttttctgcccaacctgccggactgtccttatcatcggtttccatacatttgccgctgacggcttccaagtcgccgggatgcttgccgatcagtcggataacattttgttccggcaagcctttaatcggataactgatttgttttttgccgtcgttggttttgccttcgctgctttgtcccaaatccaaaccggcaatcgccgtattgtcgatatatttgactttgaaaaccggtttcggcgcgctttgtaccgcgttttgcggctgttccgccgtattttcggatttgccgcaggcggcaagcagcaggcagccgcccaatacggcaaaagatgttttcagcattccacactcctgatggtttcaaaatgccgtctgaaacgcggcaggcggaggttcggacggcatcgggttcatttcaacgggcggatgccgaccgcatcgcgtactttgtccaataattcgcgtgcttctttacgcgctttcgccgcgcctgcctgcaaaatctcttcgatttgcgaagggtcggcggtcagctcgttgtagcgttcgcgcggttcggcgagttcggcgttgattttcgccgccaaaagttttttggcttcaccccacgccaagccgtcggcaagcattttcgtaaattccaccgtttcagacggcgtggagaaggctttgtagatttcaaacaatgggctttcgtcgggctgtttcggctcgcccggctctttcatattggtgatgattttgttgaccgatttttgggtttttttgtcgttttcccaaagcggaatggtgttgccgtaggatttggacattttgcgtccgtccaaaccgaccaagagttcgacgttttcatcgattttcacttcgggcagggtgaagagttcccggaagcggtggttgaagcggccggcgatgtcgcgcgccatttcgacgtgttggatttggtcgcgcccgacgggcacttcgttggcgttgaacatcagaatatcggcagtcatcagaatcggataactgaacaaacccatttccacaccgaaatcagggtcttcctgcccgttttctgcatttgcctgcacggcggctttgtaggcatgggcgcggttcatcaaacccttggcagtgatgcaggtcagaatccagttcaattccatcacttcgggagtgtcgctttggcggtagaaggtggtgcgctcggggtcgagtccgcaggcaagccaagtggcggcaacggcttgggtggattggtgaatcatctccggctcgtggcatttgatgataccgtggtaatcggcgaggaagaggaaggattcggtatcgaggttttgcgccgcgcggacggcggggcggatggcgccgacgtagttgcccagatgcgggatgccggtggtggttacgccggtcagaactcgttttttgctcataaaaatgtccttgcggcatcaatgccgtctgaaagggaaaaagatgtgccgattatacccgatttgccacctacatccagccgacaacagacttttccatattaagaagatatagttatacacattattatacatttttatatactttaaattcaatgatatatcgaattaaatatagaaaaacagaaaacagaacttgagttatccacaattatgcacatataggcttcgacagcggacattttgaaaaggaaacaaaaatgcgatacgacaaattaaccgccaaattccaacaagcccttgcagaagctcagagtttggcgttggctgcggacggcagctatctggaagcgggctttgtgttaaaagccctgcttgacgaccaaaacagcggagccgccgcgctcttggctcatgcgggcgtgaacgtgccgcaggtgaaacagcgtttgcagcagcatttaaacagcctgccgaaagtgtccggtcagggcggcgatattctgcccagccgagaattgcaggcggtgttgaacctgatggacaaagctgccaccaaacgcagcgatgcctatattgccagcgaacttttcctgcttgccttggtacagcagaacgatgcgaccggcaaaattttgaaagaagccggcgcgaccgaacaaaacatcaatgccgcgattgacgcagtacgaggaggacaaaacgtgaacgatgccaatgccgaagaccaacgcgatgctttgaaaaaatatacgcttgacctgacccagcgcgcccgcgacggcaaacttgaccccgttatcggtcgtgacgacgaaatccgccgcgcgattcaggtattgcaacgccgtaccaaaaacaaccctgtgctgattggtgagccgggtgtgggtaaaaccgccattgttgaaggcttggcgcaacgtatcgtcaacggcgaagtacctgaatccctgcgtaacaaacgcttgctggttttggatttggcggctttgattgccggcgcgaaataccgcggcgaatttgaagaacgcttgaaaggcgtgttgaacgatttggcgaaagacgacggcaacactctgattttcattgatgaaatccatactttggtcggcgcgggcaaaaccgacggcgcgatggacgcgggcaatatgctgaaaccggctttggcacgtggcgaattgcactgtatcggcgcgaccactttggacgaataccgccaatacatcgaaaaagatgcggcactcgaacgccgcttccaaaaagtattggttggcgagccaagcgtggaagacaccatcgctattttgcgcggtttacaggagcgttatgaaatccaccatggtatcgatattaccgaccctgctatcgttgccgcagcggagttgagcgaccgctacattaccgaccgcttcctgcccgataaagcgattgatttgattgacgaagccgccagccgtgtcaagatggaaaaagaaaccaagccggaagcaatggacaaaatcgaccgccgtctaattcagcttcggatggaaaaggcgcacgttgaaaaagaaaaagacgatgccagcaaaaaacgtttggaactgatagacgaggaaatcaacggtctgcaaaaagaatacgccgatttagacgaaatctggaaagccgaaaaagcaatttcagacggtgctgctaatattaagaaacaaattgacgaagtcaaaattaaaatcgaacaggcaaaacggcaaggcgatttggcactggcttcaaaattgatgtatgaagatttggagcatttggaaaaacagcgtgcagccgccgaacgggcagatacggacagcacaaaaccggcaaacaaactcttgcgtaataatgtcggcgcagaggaaatcgcagaggtggtttcccgtatgaccggcattcccgtatccaaaatgatggaaggcgaacgcgacaaactgctgaaaatggaagaagtattgcaccgccgcgtggtcggacaggacgaagccgtgcgtgccgtgtccgacgctatccgccgcagccgctccggtcttgccgatccgaacaagccttacggcagcttcctgttcttgggcccgaccggcgtgggtaaaaccgagttgtgtaaagccctggcaggctttctgttcgacagcgaagatcatctgattcgcatcgatatgtccgaatatatggaaaaacacgccgttgcccgcttaatcggcgcgcctccgggctatgtcggctacgaagaaggcggctacctgaccgaacaagtgcgccgcaaaccgtacagcgtgattctgctggacgaagtggaaaaagcccatcccgatgtgttcaacatcctgctgcaagtattggatgacggccgcttgaccgacggacaaggtcgcaccgtggacttcaaaaataccgttatcgtgatgacttccaatattggtagccaacatatccaacaaatgggcattcaggattacgaagcggtgaaagaagttgtgatggaggatgtgaaagaacatttccgccccgaaatgatcaaccgcatcgacgaagtggtcgtgttccacggactggatcaggataatatccgcaacattgcgaaaatccagctcaaaggcttggaaaaacgtttggaaaaacaaaacctgcgcctggctgtttccgatgccgcactggacatcatcgccaaagccggtttcgacccgatttacggcgcacgtccgctcaaacgcgccatccagtcggaaatcgaaaacccgctggcaaaagccctgcttgccggaaactatgcgcccgaaagcgaaatcagggtggaagccgacggcgacagactgaaatttgcctgattcgttcctgctgttgaaaatgccgtctgaaacgggaatctccgtttcagacggcattttttatcctcggcagacaaaccgtccccttattggcggtaggtttgcaggaatcttgccagcctgcccatcgcctcttcaatctgatggacgtaaggcagcgtaacaatgcggaaatggtcgggcttgatccaattaaaccccgttccctgcaccagcaagactttttcgcgcaccagcaaatcgtaaacgaatttcatgtcatcgcggatacggtacatttcggtatcgatttttgggaacatatacatcgcgcccatcggtttgacgcaggatacgccgggaatctggttgaccagttcccacgccctgttgcgctgttccaaaagccgtccgccgggcaaaatgaattcgttgatgctctgatagccgcccaatgccgtctgaatcgcgtgctgcatcggcgtattggcacacaggcgcatagacgagagcatatccaaaccctcgatgtaaccttttgcatgatgtttcggcccgttgagcaccatccagccttggcggaatccggctacacggtaggctttggacaaaccgttgaacgttaccgtcaaaaggtcgggggcaagcgcggcgatgtggtggtgaaccgcgccgtcataaaggattttgtcgtaaatctcgtcggcgaaaataatcaaaccgtgcttgcgcgccagttcggcgatttccaacaggatttccctgctgtacaccgcgcctgtcggattattgggattgatgacgacgatggctttggttttgggcgtgattttggcttccatatcggcaaggttggggaaccagccgttttcttcgtcgcacagataatggcgtaccgtaccgcccgcaagcgttgccgccgccgtccacaagggatagtcgggcgcgggaatcaggatttcgtcgccgtcgttgagcaatgcctgcatagacatcgtaatcagctcggacacgccgttgccgatatagacatcatcaaccgtaatatcgcgcaaacctttggtctgatagtagtgaacaatggctttgcgggcggaatacagccctttagaatcgcaatagccttgcgaagtcggcaggttgcggatgacatcgaccaagatttcatcaggggcttcaaagccgaacggcgcagggttgccgatattgagtttaaggattttattgccctcctcttccaactgaagggcttttttgtgaaccggcccgcgtatgtcgtaacagacgtgatcgagctttgcagacttgggaaatttatccatgatgtgttccgtaaattttgggcaatgggtgggaatgtactctttttcacgcggaatttaaagcatcaaaccgagattttcaggctttttacctgccctctttgcgccgttcgctgacgcttttgccgcctattccccagttatcggtatccacttcgtcaatcacgacaaccgttgtttcgggatttttgcccagcacgcgtgccagcaattcggttacgccgccgatcagttccgctttttgcgcggcagtcggtgcttccttgccgccggttactttaatattgacataaggcatgatctttctccgttttaaaatattgctatcttatcaaacaagttgcctccgcccaaacgtccgcttcattttctgaaaaattcaaatcgatatagtggattaacaaaaatcaggacaaggcgacgaagccgcagacagtacagatagtacggaaccgattcacttggtgcttcagcaccttagagagtcgttctctttgagctaaggcgaggcaacgccgtactggtttttgttaatccactatacaaaaagacagttttcagacagcaaatccgtcttcacacgatacctattttgttataacataacaaaatctttaacccacacgagacaaaggctgcaccatgaagaaaacattgacactgctcgccgtttccgccctatttgccacatccgcccacgcccaccgcgtctgggtcgaaaccgcccacacgcacggcggcgaataccttaaagccgacttgggctacggcgaatttcccgaactcgaacccatcgccaaagaccgcctgcacatcttcagcaaaccgatgcagctggttaccgaaaaaggcaaggaaaacatgattcaacgcggcacatacaactaccagtaccgaagcaaccgtcccgttaaggacggcagttacctcgtcatcgccgaatatcagcctactttctggtcaaaaaacaaagcaggctggaaacaggcgggcatcaaagaaatgcctgacgcaagctattgcgaacaaacccgaatgttcggcaaaaacatcgtcaacgtcggacacgaaagcgcggacaccgccatcatcaccaaaccggtcggacaaaacttggaaatcgtcccgctggacaatcccgccaacattcacgtaggcgaacgcttcaaagtccgcgttctgttccgtggcgaaccgctgcccaatgccaccgttaccgccacctttgacggcttcgacaccagcgaccgcagcaaaacgcacaaaaccgaagcacaggctttctccgacagcacagacgacaaaggcgaagtggacatcatccccttgcgccaaggcttctggaaagccaatgtcgaacacaaaaccgacttccccgatcaaagcgtgtgccaaaaacaggcgaactactcgactttaaccttccaaatcggtcattcgcaccattaatcccgcccgcacaaaaatgccgtctgaaggcttcagacggcattttttgttcaaacatcaataccaaccgcgcagtttcatcgctttttcaacacggcggatactcatcatgtaagacgcggttcgcaaatcgacatcatactcttgcgccaagttccatatatcgcggaacgcgcgtcgcaggacgacggtttctttctcttgaacttcgtcaaactcccaataatagccttgcaggttttgcacccactcgaaataggaaacgaccacgccgccgcagttcgccagaatatcaggcacgaccaatacgccgttttgacgcaggatcacgtcggcttcgggcgtagtcgggccgttcgcgccttcgactacgattttcgcgcggactttaccggcgttttcggaagtcagttggttttccagcgcgcaaggggcgagtacgtccacatccaaagccaaaagttcggcgttggtaatttctttgccgtaaccggcttcgttggtgatgaagcctttttcttggaactctttaaacaaagcttccatatccaaaccgttttcgttgtaaatggcaacgtcaacagtagaaaccgcaacaactttcgcgccggattgatgcgcgtaataacctgtgtggtaacccacattaccgaaaccttgaatggcgtaagtggcacccttcacgtccttgcccagtttttccaaagcttggacggcggcgaggttcacgccgtaaccggtagcctcggtacgcgccaaagagccgccgaactcaaccggttttccggtaaatacgcccggcgcggaatgtttcaccacgttttcataagcatccaccatccacgacataattttgccgttggtattcacatcgggggcgggaatatcgattttctcgccaatcagcggggcaatcgcttcagcataagcgcgggcgatgcgttccagttccgcctcggaataatcgcgcggatccaaggtaatgccgcctttgccgccgccgtaaggaatacccgcaacgcagcatttgatggtcatccaaattgacagggctttgacttcgtccaaattcacactgggatggaagcgcacgccgcctttataggggccgacggcgttgttgtgttgcgaacggtagcccgtgaaggttttgaccgtgtcgtcgtcgagtttgacgggaaaattgacttccaacacgcgggtcggactcttcaggatttcataaacggccggatcggttttcagccggtcacaggcggttttcacctgtttgcgcgcgatttcaaacggattgagggtttcttttgcaagggcttcagacattttgcttccttttcacaaagagaggttcggaatggaacaagccatcaggttcgcaactataaccaattttcaagcaaaatgtaatagcgtgtagttggaatcggcccgatttgattaatctatatatgattttatttcccaagccgcacggaatccgtctgaaaaaagcggaacacatatccaaaaagcaaatgtccaattaaataaagatataagaatccttttattttttaaaaatttaattggaacggcgccgggatttgcacacccttcccgactccgttccgaaatccggaaacaccgccggcaaaacctgtttcgattgttaacaatccatacattagaagccctgtgcaaacgatgttaaaataaaccttttcaacccgacagaaaaccggattatgaatgcagccatcgaacacgtccaagccgtcgccttcgatttggacggcacactgtgcgattccgtccccgaccttgccgccgccgcagaagcgatgttggaacaactcggtatgaaaccgctgcctgccaaagtggtcgaaagctatgtgggcgacggcatcggcaaactggttcaccgcgtcctcaccaacgaccgcgaccgcgaagccgattccgaactgtgggaaaaaggtttcgtatctatatgaaatactaccgcgaccatttgagcgtcttcacccgcccctatcccgaaaccgaagccgggctggcattgcttaaatctttgggcatcccgctcgccgtcgttaccaacaaaaacgaaatccttgcctccgagcttctaaaacaactgggactcgccgactattttagcctgatactcggcggcgacagcctgcccgagaaaaaacccagccccctgccgctgcggcacgccgccgaagttttgggtatcgatgttgcaaacatggttatggtcggcgactcgcgcaacgacatcatcgccgccaaagccgccggctgcctgagcgtcggcgttaccttcggttacggcgatatgacgctgctctcgcaagacgatgcgacccgccccgactggattatcggctcgctgcccgaaatttacgaaaacctgcaacctcagaaaaacaaagaagagtaggcattcggacggctccggtttgcgccgctatgccgtctgaaacctgccccacgccgaaaccgccgccatgaaaccgcaaaaatccctacgcgcccgcgcgatggacatcctctcgcgccaagaactcagccgcatcggtctgaaacgcaaacttgcaccgcacgccgaaagcgaagaggagttggaaaacgtgttaaacgaatttgccgaacgcaactggcagtcggatttgcgctatgccgaagcctatatccgcagcaaaagccgcaaacacggttcattgaggctgaaacaggctttggcgcaacagggcatagatgaagaaaccagccgcaacctgcttcccgaccgctcaagcgaaaaactggccgccatagccgtgttgcgtaaaaaattcaaacatccggccgccgaccttaaagaaaaacaaaaacaggcacgcttcctcgcctatcgcggttttgatgccgataccgttcagacggcattgaaacatgcctgggatgacggctgggaggaagactgctgaactgaatccttgaatctttttgcatgacggcgtaaccttacctccatttccaacttttccgattgagaataaaatgtccgaacaatccgagaaaaatcacaacccacttcttgaagatgaacgcaaaaacccggtttaccgtatgggtcaggcagttgccggattcatgctcgtcgtttgggcaggcgtattggcactcgtgtttttcctagtcttccgtttttggctttcctaaacaaaatgccgtctgaaaccttcagacggcatcggcagcccatttcggcaggctatcccatcatagctttttttagcttgaattccactttcccattccctaaaatttttccacacccatttcaaaataccctttcttaaaacaggtacactatgacacaacaacgccaactgccttcgcacgaactcattatgtccgaactgatgatgccggacaccgccaatttcagcggcaacgtacacggcggcgaactcctgctcctgctcgaccaagtcgcctattcctgcgccagccgttacagcggcaattattgcgttaccctgtcggttgacaaagtcctgtttaaagaacccatccatgtcggcgacctggttactttctacgccagcgtaaactacacggggcgtacctctatggaaatcggcatccgtgtcgaagcacaaaacatccgtacgggagaaatccgccataccaacagctgctacttcaccatggttgcagtcaaagacggcaaacccgtccctgtccctccgctggaaatcctgaccgaccgccaacgctgccgctacgaaaaagccaaaaaacgcagagacatcagcctgcaagcctccggagacgtgtcctgcggctgctgacggcggactatgccgtctgaaagacaggcacatcgcgccatccgtttccattgcaaacggatgaaatcaagcaaatatagtggattaaattcaaaccagtacggcgttgcctcgccttagctcaaagagaacgattctctaaggtgctgaagcaccaagtgaatcggttccgtactatctgtactgtctgcggcttcgtcgccttgtcctgatttttgttaatccactatacccaaacacagtcaaacaaatttatatgccccatcccttccgaataatttgaaaacacagccgccaaaaacaaaaatgccgtctgaaaacctttcagacggcatttccaacttgatttcaggcagaaagtcagaacgcgatatagctgttcgggttaaccggtttgccgttttgacgcacctcgaaatgaagctgcgttctggaagcatcggtattgcccatcaaagcaacctgctgaccgcgtttgacctgctgcccctcgccgaccagcaatttttggttgtgcccgtatgcggtcaggaaagaagaattatgctggatgatgaccaagtttccgtatcccctcaaacctgaaccggcataaaccactttgccgtcagccgccgccaaaacgggctgtcccgcattaccggcaatatcgacacccttgttgttgccgccgaaatcggcaaccactttaccttgcgtcggacgctgccaaacaatgccgccgaccgaacgcgtgccggaaggcgaagcggcaggagattgcggggcgggcgcgggaaccgctttattttccgcagcgggcgcggcaggttgcggcgcggactgcacaggcggttgcgcggcgggtttcacaggggtttgcacggcagccggtacggcgggcctgctttctacggctgcggttttcggtgcggcatatcctgccggtttgactttaacaatctgaccgatgctcaacatattgtcggtcatgccgttccacgcacggaaatcgtcttgagagatatggtagcgtttggaaatgttgtacaccgtgtcgccgcgcacaatagtatgcgtcgccgcgttaatgtcgacgggtgcggactgtacgggcggttgcgcggcagccggtacggcgggcctgctttttacggctgcggctttcggtgcggcatatcctgccggtttgactttaacaatctgaccgatgctcaacgtattgtcggtcatgccgttccacgcacggaaatcgtcttgagagatatggtagcgtttggaaatgttgtacaccgtgtcgccgcgcacaatagtatgcgtcgccgcgttgatgtcgacgggtgcgtaagaaggaacgtatgtacccgaaacggcaggtgcagacggcggaacataagcaggaggcgtataaaccggcgcgctttgcaccggcggcacataaggcgcatcgccggcaggagccgggctgtacggcgttgctccataggggttgttgtaaactgccgaagacggcgcgtcctgcatacctgaattgcctgcaatgacaggagcaggctgttgggtggcgcaaccgcccaacagagcggcaacggcggtacaagctgccaaaagtgtcgtttgtttcaacataagataaccttcatgttccgatatatagcctgaatgcggtatatcataataaaaatgcgcgttcttctcaagcgcaaagcccgacggtatagtggattaacaaaaatcaggacaaggcgacgaagccgcagacagtacaaatagtacggaaccgattcacttggtgcttcagcaccttagagaatcgttctctttgagctaaggcgaggcaacgccgtactggtttttgttaatccactatatttgatgaaacggtcagtccgcatgccagaacgccgctgtttccgccatgtccggataggcggtcaggtcgatttgcagcggcgttacggtaatgaaacctgcgccgcattcaccgaaatccgttccctcttcccgatcggaaacttcgccgaccggtcctatccaataaatctgttcgccgcgcggattgcgcgcgggaatgacgttctgaccgtgatgcctcctgcccaaacgggcgattttaatgccccgcacatcttccggcgcaacggcggggatattgatgttccacaaaataggggactgcggggggtttttgaaaaaatgcgccaacaatgtccacagtgcctgttctgcggtcgcccaatagcgtccggaagcgtcgtttaaggaaaacgccacggcgggtatgcccataaggtaggcttcggttgccgccgcaaccgtccccgaataaagcgtgtcgtcccccatattcgcgccccggttgatgcccgaaaagacaaaatcggcctgaaaatccgaaaatacagactgcccgatgtggatgcagtcggtcggcgtgccgttgacatagtagaacccgttttgcgcctgtttcaactgcaaagggcgttccagcgtcagcgaattgctgaccccgctcctgtcgcgttcgggcgcgaccaccctgacgttggcaaattccgccgtaacgcgcgccaaaacggcaatgccttcggagaggtagccgtcgtcgttggaaatcaaaacgttcattttctatcctgaatgcttattcttcgggcaatttggtgattttgacccgctcgatgcgctgcccttctttttcgaccacttcaaaccgccagccgtggaaatcggcaaaatcgccgacatcggggatggtttgcaattcttccataatcagcccggcaaccgtatggaaatcggcatcttcctcctgctgcggcaggttgagttgcggtgcgagttccacatattccaacgcgccttccaccgtcaggctttcatcgggattcccctgaacggctggttcttcttcgcgctcaaattcttcggggaactcgcctgcgatggtttcgagcaggtctttcatggttaccatgcccaataccgcgccgaactcgtccaccaccaaagcataatccgcgctgctttggcggaagagttcgattgcgcccagcgcggtggtgctgtcgggcaggacgagcggctggcgcaatgccgtctgaatgtcgagaccgcctgtttccagcagttgggacagcaggtcttttttgttgatgtagcccaaaggttcgtccacgcccgccttaccgacaacgagcaggcggctgtaaggcgtgttttgcagttgggcacactgttcttcgcggctttgggaaatgtccagccgttcgatgtcgcggcgtgggatcatcacccccataatcgggcgttcggcaagcgtcagcacgctgcgtatcatcgatttttcgttttcttcaaaatgcgcgtcgtccccggattcgccgcccgcgtcggcaagcacgctttcgcgtatacccatcatacccaagacgttttcggcggtgcgcttgcgccacgagctgccgatgtagtcgtttttgcggctgttgcgctgcgaaatctggttaaacaattcgattaaaatcgagaagccgatggcggcgtagaggtagcctttgggaatgtggaaatggaaggcttcggcaatcaggctgaaaccgatcatcaacaaaaaaccaaggcagagcatcacgacggtagggtgtctgtcgacaaattcggtcaagagtttgctggcagaaatcattacagccatcgcgacgacgaccgcacccatcgccacgacgatatgatcgaccatcgccaccgcagtaatgaccgaatcgatggaaaacacggcatccagtatcaggatttgcgcgaccacgccccaaaacggcgcgtgttttttttggctgtcggcaacggtaaaacggttgtgcccttcgaggcgttcatgcagttcggtggtggctttgtaaagcaggaaaataccgcccgcgagcataatcatgtccttgccggaaacggcgaggccgccgatttggaacagcggctcggtcagcgtgatgatgtgcgccataaaagcaagcataatgatgcggatgacgactgccagccccagcccgataatccgtgcgcggtcgcgccgtgcgggctggaccttgtttgccaaaatcgccacaaagacaagattgtctatccccaatacgacttccaacaccaaaagcgtggcaaaacctatccaggtatgcggttctgccaaccaactgaaatccatgattttcgtattcctcaagttcaaacgcgaaaaggcagcctgaagcgctcaagctgcctgaacagacggtacgcacaaaaaacggcgggcgggcttgctgctctgctcggggtcttgcatgtgcgtgtaccttcggtcgaaataatttaaatagtttaacagcttatcggggcaatggcaaaacgccataccgtctgaaaggatgttcggacggcatgagcttattttgaaatgtttcaacacacggacggcacataaagccttcccctatgtgttgccctgattgaggggttgcgcccctctcaaatacagtctgattctaccgccgcgaagaacggatgttcgagtgcggacggagtcccaacgcttaaggggtgatgatgaagccgtctatcggcgcgtagcctttggtgttgccctctttatcggtaatgactatccactctttctgcctgctgctggtaaacggcaggtaatacagctcctccccttcggcgagacctgcctgtttcagaatgtccgcaaccgtcgtttttctcgcatccgccaagactttcagcggtttcagatgtttgcggatttcttctgcttccttgtcggaatacggcagccactggtcgggacgcatactcggctcgatacctttcagggacaaatccagcgtcttgttcttctcatccgcatcctcaggttctttcaatgcaatgcggcggatgccgaaccacgacaggctttgcagcccttcgggggctttgtgcaaatcttcgaccacgacttccgccgccgtaacaatggtcatacgatcctgttcaaacgcttccaccacaggacgcgccagcgaaacgctgtgcagaccgtacaccaaagccgccagctggatgatgccgaccatggaaaaatcgaccatgcgtgcctttgtctttttcttcgggcttgccaaaattaaagtcagcagcggaccacatacaatatcgacagccaccaccagctgataaagcgacagccctcccgtcagctcggcataaggataaggataccaaaccttaaaaaccagcaatgccgccagccctgcaaccgacaggctgattaagaggtgccagcccgcacttttcaaggcaaaacgccatctcgggactgtttttccgttttccatcatatcttgttcaaatcaaaaataaccgtaaaaacagggcgcattgtacaacagatagagactgcttaaaatgcggcgccgtctgaaatcctgccgttcagacggcatccgtcacccgacatccatacacagatatttcaattctagatattcgtccgcaccgtatttgctgccttcacgtcccaaaccgctacgtttcacgccgccgaacggtgccgcttcattgctgattaagcccgtattgatgccgaccataccgtattccaaggcttcgccgacgcgccattggcgggcggtgtcggcggtgaaaaggtaagctgccaaaccgtattccgtattgttcgcagcctcgatgacctcggcttcggtttcaaaacggaataccggacacaacggcccgaaggtttcttcgcgtgccaccgccatttgcgccgttacgccgcttaaaacagtcggttcgaaaaacgttccgcccaacgcgctgcgtttgccgccggtcaggcagcttgcacctttagcaagcgcgtcggcgatgtgctgctcgactttctccaccgctttttcctcaatcagcggcccttggttcacaccatcctccaagccgttgcccaatttgagcgcggctgctttttcactcaatttgcggcaaaattcgtcgtaaatggcggattgagcgtaaacgcggttggtgcagacgcaggtctgaccgctgttacggaacttgctggcgagcgcgccttcgacggctttgtccaaatcggcatcgtcaaacacgataaacggcgcgttgccgcccagctccaaactgagttttttaatgtccgccgcgctgtcggcaaaaatttttgcgccgacttcggtcgagccggtgaagctgattttgcggataatcgggttcgtagcaaattcatggccgatttccgaagcactgccgctgacaacaggcaacaaatcctgcggtatgcccgcttcgtaagccaacgaagccaaggcatacgcactcaaaggcgtgagcgatgcgggtttgacgatcatcgcgcaacccaccgccaaagcaggcgcggccttgcgcgcaatcatcgcggacggaaagttccacggcgtaatcgcagcggtaacgccgacgggctgtttcaacacgaccagtttttgcgacgctttcacactcgtcagcacatcgccgtcaatccgccgcgcctcttcggcaaaccagcgcacaaacgaagccgcataatcgatttcgccacgcgcctcggtcaggcttttgccctgctccatcgtcatcaggcgcgctaatgcttctttgttttctttaatctgaaaataccaacgccacaacacatcggcgcgttccaacgcagtttttgccgcccataatttttgtgctgcagctgctttttgaatcaggtttttcagcttgtccgaatccgtcttgcggacaaacgccaaagtctcgcccgttgccggattatcgactttgatgccgtctgaaaccgggggaagggaaatatcgggatgcttgattaattgggaatattcgttcatttcgtatcctccggtatgcggaataaccgctttcaaatgccgtcaatctcgcggacattatcatcttcatattccaaaactgcaaacccttccgatgccgtctgaagcatccgatcgggcagcgcaacatccgggcggtgtctgaatatggcgcgggcgcaatccctgtcgtttaagaaaaatattttttatacgatagtaatctttagaaagaaaagtaatgcagccctttgatggggtgcaatatataaggagcaaagattgcagttgcaacgtgtggtagagtatggcaaaaatccgaacattatagtggattaacaaaaaccagtacagcgttgcctcgccttagctcaaagagaacgattctctaaggtgctgaagcaccaagtgaatcggttccgtactatttgtactgtctgcggcttcgtcgccttgtcctgatttttgttaaatccactatacagtcaaaattacggagatcaaataatgatttttaaacagaatcaaaattattgggcagtttttgatgctaataaagaaactctgattgttcaaacatgttcaggtttggggttaacggcaatagaccacctatatcccccccatatcctgccattggataccgacaatgaaactttaggcacgacagtcttgcaagcgttggcaaacagcaggactttcgtttatgacagtccagaagaccaagatttttttgataccgaaaaaattcggcaacgctatgaggattgggttgccaagctatgcgggaacttgggctataaaaccagacgcgccctatttaaaaacatgatgagcgtggatatttggctgcacaacggctgcctgaaaatcagcccgagccgccatgtcaagctggaagcgtggaatgccattgatgcagacgatgtcattttatcattggataacagccctgaagaaatcggagcaggtttaaagttggcattgagccactgccgataatatttgacaaaaggccgtctgaaaaacagctttgacaaagacgcggttgccaaagagatcgacctacaaagggaagtaacgcaggcgttcggcaaaacgccgcccaagccgcagcggccgttgccgacgaactcggcaatacccgaagttacggacggtatcaggcagcccgaaccctgccggaggccgaactgcaaaacaaatccgacacaaaaaaccgtccgtccgacacaaaaaaccgcccgaaaaatctggacggcggttcaaacaggctgccccgtttaacgggcgcggcaggaagtttcgaccgaattgccgtaggcatcggtaaagccgaaaaaggcttcgccgcctttctggtgccactcggttgcgtttccgaacaaaccgtgttcggcggtatagcgttcgccggatgcggcaacgtcggaagagaggacggcacgcctgccgtccagccgcaacgcgactttgccgctgtccaaatggcggacgcgcacagacaaaccgttctcgcaggaaaacgcccgaaaatcgtccgtgccggcttggttttgaacgggcggcatatgcccgcgtccgccgtcatcatacgcctccggcacggcacaggccgccaaagacaaaaccggtacggtcagcgcgaaaaacctgatattcataaaagctccccaataaaaataagatatgaaacaaccgccctgattccaagctgcggcaacgccatactataaacggacgcgcaaacacacaagcccgataaccggaatttacctgcgatgaatcaataatccggattgcgcgccccttctttacccctcttccgatgccgccttttgcctgacgatgccgtctgaacctgcctgcccgcccggaggaatgtaaattttttccaaattccaagtaaaaaccgctatcggtgtgctaatttgcgttaaaatcctattcggcgtttaacgttttgtgcgcccgcatccctgcactgtttgatgcgggcataaggcacaaatcccgacaagcgcactgtttcatacttcgtcaatcattcagactccggtttgtgcccgtgccggcagatggttcggccgtttcccgccgttcaggcatattccgacagtgtgagataaggatttattcgatgaaatcactcaaaaccttcctcatttggggcatagtggtactggtcggcttagcatcctttaccactctggccctcagccgaggcgaacaggtcagcgcggtatggatggtcaccgccgccatatccgtttactgcatcgcctaccgtttttacagcctctacatcgccaaccgcgtaatgcggctcgatcctgaccgcctgactccggcagaacgccacaacgacggcttggactacgttccgacgcacaaaggcgtattgttcggacaccactttgccgcaattgccggcgcgggccctttggttggtccggttttggcggcgcaaatgggttatctgcccggtactttgtggattatcttcggcgtggtatttgccggcgcggtacaggatatgatggtcttgttcgtctctatgcgccgcgacggtaagtctttgggcgatattgtgaaacaggaactcggcactgtccccggcgtgattgcctccatcggtattttgatgattatggtcatcattatggcggtgttggcgttgattgtcgtaaaagcattggttcacagcccttggggtacgttcaccattgcagcaactatgccgattgcgctgtttatgggtatttacacgcgttatatccgtccgggcaaaatcggcgagatttccatcgtcggctttattttgctgatgctggcggtaatttacggcgaagatgtggctaaaagttccatcgggcattggttcgaccttgacggcatccagctcacttgggcgattatgatttacggctttgtcgcctccgtattgcccgtatggttgctgctcactccgcgcgactatctctccaccttcctgaaaatcggtacgattgcggccttggctttgggtatcgtcatcgtcaatcccgctttgcaaatgcctgccgtaacccactttatcgacggttcgggtccggtattctcaggcgcattgttcccattcttgttcattaccatcgcctgcggtgcggtttcgggcttccacgcgctgatttcttccggcactacgccgaaaatgctggaaaacgaaacccacgtccgcatgatcggttacggcggtatgttgatggaaagtttcgtagccattatggcacttgccgctgccgcatcgcttgatcccggcgtgtacttcgccatgaacagcccagccgccctgatcggtacggatgccaataccgccgccgaagtgattaccaccaagctgcaattccctgtcgatgccgcaaccctgttgcacactgctaaagaagtcggcgaaaacaccatcctttcccgtgccggcggtgcgcccaccctcgcagtcggtatggcgcacattatgagccgcctgattccgggcgaggcgatgatggcgttctggtatcacttcgccctgttgtttgaagccttgttcatcctgaccgccgtcgatgccggtacgcgcgtcgcacgttttatgattcaagacttgggcagcatcttctacaaacctttcggcaacaccgactccatccccgccaacctgattgcgaccttcttcgccgtggcattgtggggctacttcctctacacgggcgtgaccgacccgttgggcggcatcaactcgctctggcctttgttcggcatcgccaaccaaatgctggcaggcgtagccttgattatgtgcgccgtggtgctgattaagatgaaacgcgaccgttatgtctgggtggtactcgttcccgccgtcggcgtactgttcgtaacctgctacgccggcctgcaaaaactgttccacagcgacccgcgcatcagcttccttgcccacgccggcaaatacagcgacgcattggctaaaaacgaaatccttgcgcctgccaaagacatcggcgaaatggcgcaaatcatcttcaacgacaagattaatgccggtctgaccatcctcttcttgtcggttgtcgtgattgtcgccgcgtacggtttgcgtaccgccctcaaagcacgcaaagtcggctggccgaccgccaaagaaatcccggcggtgtaccgcgacggcaaacagccggaggcacaaagtgaagcataagctcgcgtcttggtggaaaaccatcaagctgacggcaaacttgatggcaggcgtgcccgattatgaaaactacgttgcacagcagcgcaaacataatcccaacgcccccgtgatgaccaagctgcagtttcaagactattgccgcaaacgccgctgcggcgcaaacggcggacgctgctgttaagcctgcttgaaacaaattccgtctgaacgccgcttcagacggaatttttataatatagtggattaacaaaaatcaggacaaggcgacgaagccgcagacagtacaaatagtacgaaaccgactcacttggtgcttcagcaccttagagaatcgttctctttgagctaaggcgagacaacgccgtactggtttttgttaatccgctataccacgatgaatccttcgcaatatctgtttatcgacctcaattttgacaaaataccggatacgcgcctttgttgcttttccatcttccaaccaactgtaaatctcaaacagccggtacacgccatgcttcagtttcttttcctgtcggcggattgtttcgacaaagaattgaaaatccatttcatgcaccttaaaatttaatctgcattcaaaccttttcactttggaagcaccatttatcggatgtcccttcgcaataaacaaattttcccgataccgccgcccatttcaacccaaacccaaaagctatgaaaaacctcatcgccttcaacaaaccctatggcgttatctgccaattttcaccgcacgaaaaacacaaaagcctcaaagactttatcaatcttcccggcttctaccccgccggacggctcgacaccgacagcgaggggctgctgctgctgaccgacgacggcaggcttcaggcacaaattaccgaccccaaattcaaacaccctaaaacctactgggcgcaactggagggcgtacccgacgaaagccgattggaaagcctaagaaaagggatagacttaggcggtttcgttacccgtccggcaagcatccgcatcttgaaacacggagaagcagattcgttatgggagcgcatcccgccgatacgcgtccgcaaaaccgttcccgatttttggattgaaattaccatttctgagggcaaaaaccgccaagtcaggcgaatgaccgccaaggcgggctatccctgcctgcgtctgatcagagtggcaagcggcaggctgaaactgtttgatttggatttaaaacccggggaatgggcatacgccccgtttaaaccataatcacgtttatctcatcatttccacaaaagtgggaatccggaattttatagtggattaacaaaaatcaggacaaggcgacgaagccgcagacagtacagatagtacggaaccgattcacttggtgcttcagcaccttagagaatcgttctctttgagctaaggcgaggcaacgccgtactggtttttgttaatccgctatattccgccatctctaagatttacagcgatacacgggtgatttaaggaatgcccgaaccgtcattcccgccacttttcgtcattcccgcgcaggcgggaatctagaatctcggactttcagataatctttgaatattgctgttgttctaaggtctagattcccgcctgcgcgggaatgacgaatccatccgcacggaaacctgcaccacgtcattcctacgaacctacatcccgtcattcccacgaaagtgggaatccagaacgtaaaatctgaagaaaccgttttatccgataagtttccgtaccgaacagactagattcccgcctgcgcgggaatgacgattcataagtttcccgaaattccaacataaccgaaacttgacagtaaccgtagcaactgaaccgtcattcccacgaaagtgggaatctagaaatgaaaagcaacaggcatttatcggaaataactgaaaccgaaccgactagattcccgcctgcgcgggaatgacggctgcagatgcccgacggtctttatagcggattaataaaaatcaggacaaggcggcgagccacagacagtacaaacagtacggaaccgattcacttggtgcttcagcaccttagagaatcgttctctttgagctaaagcgagacaacgctgtactggtttttgttaatccactataaatatccaattgaaatcttcagacggtatatcaaatttacacttttttaatgtttatgccgcctgaaaaaaatgctagtatatttcctaattgtctgactgtttattgttgaggaaaatatgagatcttctttccggttgaagccgatttgtttttaccttatgggtgttacgctatatcattatagttatgccgaagatgcagggcgcgcgggcagcgaggcgcagatacaggttttggaagatgtgcacgtcaaggcgaagcgcgtaccgaaagacaaaaaagtgtttaccgatgcgcgtgccgtatcgacccgtcaggatatattcaaatccagcgaaaacctcgacaacatcgtacgcagcatccccggtgcgtttacacagcaagataaaagctcgggcattgtgtctttgaatattcgcggcgacagcgggttcgggcgggtcaatacgatggtggacggcatcacgcagaccttttattcgacttctaccgatgcgggcagggcaggcggttcatctcaattcggtgcatctgtcgacagcaattttattgccggactggatgtcgtcaaaggcagcttcagcggctcggcaggcatcaacagccttgccggttcggcgaatctgcggactttaggcgtggatgacgtcgttcagggcaataatacctacggcctgctgctaaaaggtctgaccggcaccaattcaaccaaaggtaatgcgatggcggcgataggtgcgcgcaaatggctggaaagcggagcatctgtcggtgtgctttacgggcacagcaggcgcagcgtggcgcaaaattaccgcgtgggcggcggcgggcagcacatcggaaattttggcgcggaatatttggaacggcgcaagcagcgatattttgtacaagagggtgctttgaaattcaattccgacagcggaaaatgggagcgggatttacaaaggcaacagtggaaatacaagccgtataaaaattacaacaaccaagaactacaaaaatacatcgaagagcatgacaaaagctggcgggaaaacctggcaccgcaatacgacattacccccatcgatccgtccagcctgaagcagcagtcggcaggcaatctgtttaaattggaatacgacggcgtattcaataaatacacggcgcaatttcgcgatttaaacaccaaaatcggcagccgcaaaatcatcaaccgcaattatcagttcaattacggtttgtctttgaacccgtataccaacctcaatctgaccgcagcctacaattcgggcaggcagaaatatccgaaagggtcgaagtttacaggctgggggcttttaaaggattttgaaacctacaacaacgcgaaaatcctcgacctcaacaacaccgccaccttccggctgccccgcgaaaccgagttgcaaaccactttgggcttcaattatttccacaacgaatacggcaaaaaccgctttcctgaagaattggggctgtttttcgacggtcctgatcaggacaacgggctttattcctatttggggcggtttaagggcgataaagggctgctgccccaaaaatcaaccattgtccaaccggccggcagccaatatttcaacacgttctacttcgatgccgcgctcaaaaaagacatttaccgcttaaactacagcaccaataccgtcggctaccgtttcggcggcgaatatacgggctattacggctcggatgacgaatttaagcgggcattcggagaaaactcgccgacatacaagaaacattgcaaccggagctgcgggatttatgaacccgtattgaaaaaatacggcaaaaagcgcgccaacaaccattcggtcagcattagtgcggacttcggcgattatttcatgccgttcgccagctattcgcgcacacaccgtatgcccaacatccaagaaatgtatttttcccaaatcggcgactccggcgttcacaccgccttaaaaccagagcgcgcaaacacttggcaatttggcttcaatacctataaaaaaggattgttaaaacaagatgatacattaggattaaaactggtcggctaccgcagccgcatcgacaactacatccacaacgtttacgggaaatggtgggatttgaacggggatattccgagctgggtcagcagcaccgggcttgcctacaccatccaacatcgcaatttcaaagacaaagtgcacaaacacggttttgagttggagctgaattacgattatgggcgttttttcaccaacctttcttacgcctatcaaaaaagcacgcaaccgaccaacttcagcgatgcgagcgaatcgcccaacaatgcgtccaaagaagaccaactcaaacaaggttatgggttgagcagggtttccgccctgccgcgagattacggacgtttggaagtcggtacgcgctggttgggcaacaaactgactttgggcggcgcgatgcgctatttcggcaagagcatccgcgcgacggctgaagaacgctatatcgacggcaccaacgggggaaataccagcaatttccggcaactgggcaagcgttccatcaaacaaaccgaaactcttgcccgccagcctttgatttttgatttttacgccgcttacgagccgaagaaaaaccttattttccgcgccgaagtcaaaaatctgttcgacaggcgttatatcgatccgctcgatgcgggcaatgatgcggcaacgcagcgttattacagctcgttcgacccgaaagacaaggacgaagacgtaacgtgtaatgctgataaaacgttgtgcaacggcaaatacggcggcacaagcaaaagcgtattgaccaattttgcacgcggacgcacctttttgatgacgatgagctacaagttttaaaggcagcccgcattttgtagaaaaccgcaatgccgtctgaaagcccttcagacggcatttgtttccccaaacgcatcatcctgccgcaagcctatgccaatccgttttatcgcatcggcaactcaaagaaaaatccatttcattcccacgcagggaagccggtttttgatttcggttatttttggttgtttcgggtaatttatgagtcgtcattcccgcaaaagcgggaatcagtttttttaagtttcagccatttccgataaattcctgtggctttagctttccggattcccactttcgtgagaatgacgtggtgcaggtttccgtacggatggattcgtcattcccgcgcaggcgggaatctagaccgttcggtttcggtttttttggttagtgccgcaacattaaatttctagattcccactttcgtgggaatgacggcggagcggtttctgctttttccaataaatgcccccaacctaaaatccgtcattcccgcgcaggcgggaatctagacattcaatgctaaggcaatttatcggaaatgactgaaactcaaaaaactagattcccactttcgtgggaatgacgtggtgcaggtttccgtatggatggattcgtcattcccgcgcaggcgggaatctagtccgttcggtttcggtttttttggctaatgccgcaacattaaatttctagattcccactttcgtgggaatgacggcggagcggttgctgtttttcccaataaatgccccccaacctaaaatccgtcattcccgcgcaggcgggaatctagtccgttcggtttcggtttttttggctagtgccgcaacattaaatttctagattcccactttcgtgggaatgacggcggagcggtttctgcttttcccaataaatgcccccaacctaaaatccgtcattcccgcgcaggcgggaatttagacattcaacgctaaggcaatttatcggaaatgactgaaactcaaaaaactggattccctctttcgtgggaatgacgtagtgcaggtttccgtacggatggattcgtcattcccgcgcaggcgggaatctagacattcaatgctaaggcaatttatcggaaatgactgaaactcaaaaaactggattcccgctttcgtgggaatgacgcgattagagtttcaaaatttattctaaatagctgaaactcaacgcactggattcccgcctgagcgggaatgacgaagtggaagttacccgaaacttaaaacaagcgaaaccgaacgaactggattcccactttcgtgggaatgacggaatgtaggttcgtgggaatgacgggatgcaggtttccgatggatggattcgtcattcccgcgcaggcgggaatctagacattcaacgctaaggcaatttatcggaaatgactgaaactcaaaaaactggattcccacttttgtgggaatgacgcgattagagtttcaaaatttattctaaatagctgaaactcaacgcactggattcccgcctgagcgggaatgacgaatttcaggttgctgtttttggttttctgtttttgtgaaaataatgggattttagcttgtgggtatttaccggaaaaaacagaaaccgctccgccgtcattcccgcgcaggcgggaatctagtccgttcggtttcggtttttttggctagtgccgcaacattaaatttctagattcccactttcgtgggaatgacgggatgtatagtggattaacaaaaaccagtacggcgttgcctcgccttagctcaaagagaacgattgtctaaggtgctgaagcaccaagtgaatcggttccgtactatttgtactgtctgcggcttcgtcgccttgtcctgatttttgttaatccactataaatttaatccactatattttttgttccaaagtcaaaatatgccgtccgaacattcgggcggcagacaaaacggcactgcccgataaaggcagtgccgttgtccgtttcaaaccgtgaaacatcagcccaaattaaaggctttatgcaataccctggttgccagttccatgtatttttcatcaatcaatacggaaactttgatttcggaggtggaaatcatttggatgttgataccctcttcggcgagcgtgcggaagattttggcggctacaccgacgtgcgaacgcatacccaaaccgactgcggagactttgcatacggtgtcgtcgccatcaatagaagccgcgccgatactgtcttggcgttccgacaggatttccaaagtctgcttgtaatcgccgcgcggtacggtaaaggaaaaatcggttgtgccttcgctgccgacattttggataatcatatcgacttcgatgttggcatcggcaaccgcgcctaaaatctgataggcgacgccaggtttgtcgggtacgccgcgcacgttgatgcgggcttggtttttatcgaatgcgataccggttacggcagctctttccatgttgtcgtcctcttcaaaggtaattaaggtgccattgccgccgtcttgcaggctgctcagtacgcgcaggcgcactttgtattttccggcgaattctactgaacggatttgcaaaactttcgaaccgaggcttgccagttcgatcatttcttcaaatgtaaccgtatccatgcggcgcgcttcgggtacgacgcgggggtcggttgtgtaaacgccgtctacgtcggtatagatttggcactcgtcggctttgagcgcggcggcaagcgcgacggcggaagtgtcggaaccgccgcgtccgagcgtggaaatatcgccttcactgctgatgccttggaagccggcaacgatgacgactttgccggcggtaaggtcggcacgcattttttcgtcatcaatgctttcgatgcgggctttggtgtgggcggtatcggttttgagggcgacctgccagcctgtgtagcttttggcatccacgccgatgtctttcaatgccatcgccaaaaggccgatggttacttgttcgccggtagctaagacgacgtccagctcgcgcggatcgggatgctcttgcatttcgtgcgccagtgcgaccagtcggttggtttcgccgctcatggcggatacgacgactacgatgtcgtgtccttcggcgcgggctttggcgacacgtttggctacgtttttgatgcgttcgggcgagcctactgatgtgccgccgtatttatgtacgattaacgccatgtttcgtgctttcttgtgggggttgtcgggcagcttggtttgctggaaaaagggttattattactattttttacatggaattcaagaacggactgcgctttcccgcctgccgtttgacagcggtcagcgaaaaacctgttctttcagattgttgacaaaatgccgtctgaacggttttcagacggcatccggacgacaatcaggcggcggacaacgcattttgctggtgttgcagcagttcgcctatgcctttttgcgccagtgcaaccagtttgcccaattcgtccaaactgaacggcgcgtcttccgccgtcccctgtatttcgatgatttttcccgatgcggtcatgacgatattcacatcactgtcgcaaccggagtcttcgggataatccaaatccaaaagcggcacgccgttcactacgcctactgacacagcggcaacggcttcgcggatggggttttcactcaaaatgccgtctgaaaccagtttgccgacggcgatttgcagcgcgacaaacgcaccggtaatcgaagccgtgcgcgtaccgccgtctgcctgaatcacatcgcagtcaatcaagatttgtcgttcaccgagtttttccatatccacgaccgcgcgcagggaacgcccgatcaaacgttggatttcttgtgtgcgcccggactgtttgcccgccgaagcttcgcggagcatccgggaagcagttgaggcaggcagcatcccgtattccgccgttacccagccttggtttttaccgcgcagaaacggcgggacgttttcatctatggaagcggtacaaatcactttggtattgccgcattcaataaggcacgaaccgtccgtatgcggcaggaaatgaggggtgattttgatatcgcgcaggctgtcggcggcgcgcgagatgcggatgtaatcaggcatactgccctcccgttaaaaacagataaattaaaaagccttaaatatgaaaaatcacatttaaggccttcaaactgaaaatttctacgcctcttcggctttgctgcggataatcaaaagcggcaggtggctttggcgcattaccgtttcggcaaaactgcccattaaaaggtgcatcagcccggtacgtccgtgcgtacccaacaccagcaggtcggcaccgttttcatcggcataatcaaccaaatcctgcgccatttcacgcgcacccttattggcaaccagcaggtgtttgacggtattttccacacccagttcctgggcggtgcgctcggcggcatccaaaacttcgttgccttgcgcgacggcggcggcttcgtagctttcgtgttgcaaaaattcgggggcgagtgccatatattcggcaggattggcaacgtgcaccaaagtcaggcgcgcaccgttgaccccggcaagctcggcggcatgtttcagggcattgatggacgtttcactgccgtcaacggcaacaaccaaatgtttgtacatatcgtattctccttttgcaccgcctcgcggtgccctcttgtcggatgggcgcagggacagtttgcgctgtttcattatagacccgccgtcgggctttatacaacagccgaacagcccgaccgctttccagtataatatgccgcttccgtgcagtcaggcattttttgccggctttcgttcactttttgatttgacgcaatcttgcaggattcgaccatgtccgacaacgctttgacctcttcgcgacgcttcggcggcatcgccagactctacggagactctgccttggcgcacttttcacaggcacacgtctgcgtagtcggcgtgggcggtgtcggctcgtgggcggtcgaggctttggcgcggacgggcatcggacgtttgactttgattgatttggacaacgttgccgaatcgaatgtcaaccgccagctgcacgccctgaccggcgacttcggcaaagcaaaagttaccgccttgcgcgaacgcattacacaaattaatccgcaatgcgaagtgtttgaaattgaagatttcgttaccgaagacaatttgccggaatacttcggaaaaggttttgatttcgtcatcgacgcgatcgaccaagtgcgcgtcaaagcagcaatggcggcttattttgtggaacgcaaacaaccgtttgtcctcagcggcggcgcgggcggacaaaaaaatccggcgttaatccaaaccgccgatttgagccgcgtaacccacgacccgctgcttgccaacctgcgctacaccttgcggaaacgctacggattcagccgcgatacgaaagcaaatatgcgcgtgccttgcgtgtattcgaccgaaaatatcgtgccgccgcagtctagggaggcttgttcggcagatgccgctccgcaaggcttgtcgtgcgccggctacggtgcaagcatgctcgttaccgcttcgttcgggctatattgcgcacaggcggcggtggaacacatcgcagacaaaaaataagcaatgccgtctgaaacaggattcagacggcatttgaacaaactatggttatgatttaagacaacaaaggatacggataaaaaataacataaaatatatgattcctaataatataccaagtatcggagagctatttaatggaattcgttaataatttagttattttttcatttttattactaatgcttattccgatattttttgtagtatatggtatataccataagatacgttatcgcaaaatatgtatcctaagaacaagttttatattattagtggtaatactttgcagtatgtattacatatattgccgttatcttgaccaacaaaaagtagcttattattgcatagatgaacaatgtatttctattgttcatctatacaaagattatggtataaactctcccacatatgcgagaatttacgcaggaaaaatattgtttagatttcaagtaagagctaaaaattacgctgaattacttatggaagatgatatatcaattagtaaaaaaattttggggaataaatttatcatttatgggtcgctacctgtaatatacggtaatgtagataatattgaagtaaaagaagctactggttatatagatagatccagtactgattatattgtctcaagaaacttaaaattcagacatttatattaattaagaggttttagcaagagtgccgtcaaaatatagggcgcatcatcgaattcgcgaaagacaaacgctacgatgaacgtttcaaggatttgaaaaaagaatccataggctatctgaaccggcatcccggtttggtgtccgactacctgaaggcggcaatcaagctgtcggttcagaaaaaccaacatcagcacgcctaaaaccgtattcacaacctgctccttttcaaaacatttgcatttaaaagccgttataatgccgtctgaacatctgcccgaccacattatacgtgaatgtcggcagattgttttcttttgtaaacttatattaaaatccacttaccgattcacgccatgccgcccatccctgccccatctgcaccatccgagcacactgtcgcatgggtattcggccaacccgttaccgatttgccccaggatttgtttattccgcccgatgcattgaaagtcgtattgggcagcttccaaggccctttggatctactgctgtatctgatccgcaaacagaatatcgacgtactggatattccgatggtgaagattaccgagcagtatctgcactacatcgcccaaatagaaacctatcagtttgatttggcggcggaatatcttttgatggcagcaatgctgattgaaatcaaatcgcgcctgctgctgccgcgtaccgaaaccgtcgaagacgaagaagccgacccgcgtgccgagttggtgcgccgcctgctggcttacgaacagatgaagctggcggcgcagggtttggacgcgctgccccgagccggacgggatttcgcgtgggcttacctgccgctggaaattgccgtcgaagccaagctgcccgaagtctatattaccgacttgacgcaagcgtggctgggtattttgtctcgggcaaaacacacgcgcagccacgaagtaatcaaagaaaccatctccgtgcgcgcgcaaatgacggcaatcctgcgccgtttgaacggacacggaatatgcaggtttcacgacctgttcaatcccaaacagggcgcggcttacgtggtcgtcaacttcatcgcactgttggagcttgccaaagaaggattggtcagaatcgtgcaggaagacggtttcggagaaatccgaatcagcctcaatcatgagggggcgcattcagacggcatttccggcacacgaggcgggcgcgatgtgttctaatacgccccaagccgccaccaaaaatcgggagacacgccatatgaccggcatcatacattcgctgcttgacaccgacctctacaaattcactatgctgcaagtggttctgcaccagtttccgcagacgcacagcctttacgaattccgctgccgcaacgcctcgaccgtctatccgcttgccgacatcagggaagacttggaagccgaactcgacgcgctctgccaactacgcttcacccacgacgaactcggctatctgcgctccctgcgtttcattaaaagcgactttgtcgattatctcgaactcttccagctccaacgccgctttgtcgaaatcggcacagacgataaagaccgtctgaacatccgcatcgaaggtccgatgatacaggcgatgttttttgaaatcttcatcctcgccattgtcaacgaactttacttccgccgcctggaaacccctgcagtcatagaagaaggcgaacgccggcttcaagccaaagccgcgcgcctcaaagaaatcgccgccgcacaaaaccccgacgaaccgcccttcctgatttccgacttcggcacgcgccgccgctacaagctcgcgtggcaggaacacgtcatccgcaccctgcttgaagccgcccccggcatcgtacgcggcaccagcaatgtctttctcgccaaaaaactcggcatcacccccatcggcaccatggcgcacgagttcctgcaggcattccaggccctcgacgtacgcctgcggaatttccaaaaggccgcgctcgaaagctgggtgcacgaataccggggcgatttgggcgttgccctgaccgacgtggtcggtatggatgccttcctgcgcgatttcgacctctatttcgccaaacttttcgacgggctgcgccacgacagcggcgacccttacgtttggggcgacaaagcctacgcccactatcaaaagctcaaaatcgacagccgcaccaaaatgctgaccttctccgacgggctggacatcgaacgctcttgggcattgcaccaatatttcaaagaccgcttcaaaaccggcttcggcatcggcaccaacctcaccaacgatatggggcatacgcccttgaatatcgtcttgaaactggtcgaatgcaacgggcagtccgtcgccaagctgtccgactctccgggcaaaaccatgaccaacaacagcaccttcctcgcctacctgcgccaagtgttcgacgtacccgaacccgaaacgccgtaaaccggcagaaaaagcgcacaattcctgtttctgccgcataaaatcttttaaaataccgcctgatttgaatttaaccgaaagaccgaacttcatgaacctacatcaaaccgtcgaacacgaagccgccgccgcctttgccgccgcaggcatcgccgacagccctattgttttgcagccgaccaaaaacgccgaacacggcgatttccaaatcaacggcgtgatgggtgcggcgaaaaaagccaaacaaaacccgcgcgagttggcgcaaaaggtcgccgaagcattggcggacaacgccgtgattgaaagcgcggaagtcgccggtccgggcttcatcaacctgcgcctgcgccccgaatttctcgcgcaaaacattcagacggccttgaacgacgctcgtttcggcgtggcaaaaaccgacaaaccgcaaaccgtcgttatcgactattcttcgcccaatctggcgaaggaaatgcacgtcggccacctgcgttccagcatcatcggcgacagcatttcgcgcgtgttggcatttatgggcaataccgttatccgtcaaaaccacgtcggcgactggggtacgcagttcggtatgttggtcgcttatttggtcgagcagcaaaaagacaatgccgcgttcgagctggcggatttggagcagttttaccgcgccgccaaagtgcgctttgacgaagaccctgcctttgccgacaccgcacgcgaatacgttgtgaagctgcaaggcggcgatgaaaccgttttggcattgtggaaacagtttgtcgatatttcgctctcgcacgcccaagccgtttacgacacgctgggcttgaagctgcgtcctgaagacgtggcaggcgaatcgaaatacaacgacgatttgcagcccgtggtcgatgatttggttcaaaaaggtctggcggttgaggacgacggcgcgaaagtcgtgttcttggacgaatttaaaaacaaagaaggcgaacccgccgcatttatcgtgcaaaaacaaggcggcggcttcctctacgcctccaccgatttggcgtgcctgcgctaccgcataggccgtctgaaagccgaccgcctgctgtacgtcgtcgaccaccgccaagccctgcacttcgaacaacttttcaccacttcccgcaaagcaggctatctgccggaaaacgtcggcgcggcatttatcggcttcggcaccatgatgggcaaagacggcaagccgttcaaaacgcgcagcggcgacaccgtgaaactggtcgatctgctgaccgaagccgtcgagcgcgccaccgctttggtgaaagaaaaaaatcccgaattgggtgcggacgaagccgctaaaatcggtaaaaccgtcggcatcggcgcagtcaaatacgccgacttgagcaaaaaccgcaccagcgactatgtgttcgactgggatgccatgctctcgtttgaaggcaacaccgccccctatctgcaatacgcctacacccgcgtgcaaagcgtgttccgcaaagcaggcgaatgggatgcaaatgcgccaaccgttttgaccgaaccgctggaaaaacagcttgccgccgagctgctgaaatttgaagacgtactgcaaagcgtggcggacacggcgtatccgcactacctcgccgcctacctctatcaaattgcgaccctgttcagccgcttctacgaagcctgtccgatactcaaagccgaaggcgcaagccgcaacagccgcctgcaactggcaaaactcaccggcgacacgctgaaacaaggcttggatttgctgggcatcgatgtgttggacgtaatgtaaaaccgcaccgcccgattgcggacaacagcctcgccatccttatccgaatctgaaaaaagcggcgcgatacaccgtatccgccgcccctcccaaaatgcgaaacaaacaaacgccaagcaagcaagcaagcaagcaagcaagcaagcaagcaagcaagcaaaaaattataacccccttcctgccgacgcacgcactttccgcgcggcgcattccccttttcccgcccctcaaatccgccttttcttcaggcagggtttcagcccgcctcttttccctgttttcctttccccgacacgcgtgcgctccccctgccgcactgtgctgcactttcgcgcccggacggcatcgttccgccatccggttctctgttttacatacccctgtttcagaaagaaatgcagatgtttcaacacacaggacgacacataaagcaccgccctatgtgttgccctgatttggaaggggttacgcctcccaaataaagtctgatcctgccgccccgaaggacagatgtccgagtggcgaagtttcaaccgaaaaggaaatacgatgaatattcacaccctgctctccaaacaatggacgctgccgccattcctgccgaaacggctgctgctgtccctgctgatactgcttgcccccaatgcggtgttttgggttttggcactgctgaccgccaccgcccgcccgattgtcaatttggactatcttcccgccgcgctgctgatcgccctgccttggcgtttcgtcaaaattgccggcgtattggcgttttggctggcggttttgtttgacgggctgatgatggtgatccaactcttcccttttatggatctcatcggcgccatcaacctcgtccccttcatcctgaccgcccccgccccttatcagataatgaccgggctgttgctgctgtatatgctggcgatgccgtttgtgttgcagaaagccgccgccaaaaccgacttccggcacattgccgtctgcgccgccgttgtggcggcagccggctatttcaccggccatttgagttactacgaccggggtcggatggccaatatcttcggcgcaaacaacttctactacgccaaaagtcaggcgatgctctacaccgtcagccagaatgccgactttattaccgccggcctggtcgatcccgtcttcctccccttgggcaatcaacagcgtgccgccacgcatctgaacgagccgaaatctcaaaaaatcctctttatcgtcgccgaatcttgggggctgccggccaatcccgaacttcaaaacgccacttttgccaaactgctggcgcaaaaagaccgtttttcggtttgggaaagcggcagttttcccttcatcggcgcgacggtcgaaggcgaaatgcgcgaactgtgtgcctacggcggtttgcgcgggttcgcactgcgccgcgcgcccgacgaaaaatttgcccgctgcctccccaaccgtttgaaacaagaaggttacgccacctttgcgatgcacggcgcgggcagttcgctttacgaccgcttcagctggtatccgagggcgggctttcaagaaatcaaaaccgccgaaaacctgatcggtaaaaaaacctgcgccattttcggcggcgtgtgcgacagcgagctgttcggcgaagtgtcggcatttttcaaaaaacacgacaagggactgttttactggatgacgctgaccagccacgccgactatcccgaatccgacattttcaaccacaggctcaaatgcaccgaatatggcctgcccgccgaaaccgacctctgccgcaatttcagcctgcacacccaattcttcgaccaactggcggatttgatccaacgccccgaaatgaaaggcacggaagtcatcatcgtcggcgaccatccgccgcccgtcggcaacctcaatgaaaccttccgctacctcaaacaggggcacgtcgcctggctgaacttcaaaatcaaataacaacaatgccgtctgaacgcaccaacagccttcagacggcattttgcagacagaccgacccttcaagcccacttttttcatcatctccgataaattgctttgtatagtggattaacaaaaaccagtacggcgttgcctcgccttagctcaaagagaacgattctctaaggtactgaagcaccaagtgaatcggttccgtactatttgtactgtctgcggcttcgtcgccttgtcctgatttttgttaatccgccataaagaccgtcgggcatctgcagccgtcattcccgcgcaggcgggaatccagaacgtggaatctaaagaaaccgttttacccgataagtttccgcaccgacagacctagattcccgcctgcgcgggaatgacgggattttaggtttctgattttggttttctgtccttgtgggaatgacgggatgtaggttcataggaatgacgtggtgcaggtttccgtatggatggattcgtcgttcccgcgaaagcgggaatccggaaacccaaagccacgggaatttatcggaaaaaccgaaaccgctccgccgtcattcccgcgcaggcgggaatctaggtctgtcggtgcggaaacttatcggataaaacggtttcttcagattttacgttctggattcccactttcgtgggaatgacgggatgtaggttcgtaggaatgacgtggtgcaggtttccgtatggatgggattccctcttgcgtgaggctgacagatgccgtctgaaagactttcagacggcatagctttttctctttgaatttatagtggattaacaaaaatcaggacaaggcggcgagccgcagacagtacagatagtacggaaccgattcactcggtgcttcagcaccttagagaatcgttctctttgagctaaggcgaggcaacgccgtactggtttttgttaatccacgataaatttgccacaaaaaagctgcctcaaatgaatacccgggcagctttttgttgatatgactccaatcagcggtgttgcggattgtaacgtttttccaaacgcaggaatatccagcctaagaaagtcgtcatcaacagataaatcagggcgacggtgtaaagcggttcttcataaaccgaataccggcccgtaatcgtattctgaacatacgccaactccgccacagcaatgaccgacagcagcgagctgtctttcaagagcgtgatgaactcgctcgccaaaggcggcagcatgcggcgcaatgcctgcggcagaatcacatagcgcatcgcctgcggataggtcagccccaaagaacgcgccgcctccatctgtcctttgtctatagactggatgcccgcgcggaaaatctcacagatatacgcccccgagttggcgatcagtgccaaagaaccggcaatcagcggcccgtatccgcgacgcagcgcgattgccgcctcgccgctgaccaaaatgccgtctgaaggatggacgaaaaacggaaaccacacatacgcccaaatcacaatctgcacaaacagcggcgtaccccggaacagcgtaacatacagcagcgaaactttacgcaacgcccacgccagcacgcgcatcggcgcaccggctttttccaagtgaatcaggcgcgccaacgccaacaacagacccaataccgaaccgcccgccgttgccacgaccgtcagccccaaggtcgtcagtgcgccgtaaagaaacatccagcggtattcgtaaataatgtcaaaacgaaaatccataaaccgtccgtatcaaaaaccggcggaactgccgccgttgcaaaataatccgccattttaccgtaaaaaccgccgcctgaacttttttatcgcggcagacggcggttgcgcgtctccgcaaaaatgcagggcgcgcggttttcagacggcatttgccgttcaaagccgtgcggtgtctttaccaaatgcccaaccattcgcccacggcatccatccaatccttattgcccccgccgctcctgcctgctcggcggtacgcccacggcgcttgcggatttttagctttccacaatcctttgcgttccctttccgcctgaatttgagcgtcggcataatcggcaaaatccgccttatcctgctgttctttagcataacttttataatgccacgccgccccgtcctgcacctgcatcaggttcaaatcggttttgccgacagaaacctgcgccacttcgcgctggtagcggtcggtatcgaacacgcgcacgctgactttcctgccttccgccgccgcgcgcaggttgtcgcgcgaacgcgtgccgtaagcctgtttcatctccggcgcgtcgatatacgccatccggattttgtgtttcgcgccgtcgccgtcgataacgtgaagggtgtcgccgtcatagactttggacaccgtgcctgtgtagcggtggccggatttcgccgatgctcggcggcgggcgggcgcgtcggaacccgcgtcccctgccgcgccgagtacgtcgagtacggcaaccgccgtccgcaccgcctcgctgccgtaccccgtataacccaacgcacccaaaagcgacagggcgacgggaagccatttcatgatttttttaatctgcatatttttcaaatgccgatgccgtctgaacatatcggaatcggatttcagacggcatcttaacgtcaggattacccttggcagggatagatgactttcgcaccctcttccgtccccaaaatcaacacatcggcggcatcgcgggcgaatatgccgttttcgagcacgccggtgattttgttgatttcgtcttccatcgtcagcggctgatcgatattcaagccgtggacatcgacgatttggttgccgtaaaacgtggtgtagccgatacgcagttcgggctgtccgcccatagcgagcagtttgcgcgaaacaagagagcgcgcgctttcgacgacttccacaggcagagggaatttgcccaaacgtgaaacatatttgctttcatccgcaatgcagatgaatttttcggacgcgctggcgacgattttttcgttgaggtgcgcgccgccaccgcctttaatcatttgcagggcgtggttcacttcatccgcaccgtcgatatagaccgccaaccccgatacttcgttcaaagaaacgacgggaatatcgtactgggcaagcagttcgccggattttttggaagtagataccgcgcctttgatttttttgccgctcttacccaaggcttcgatgaaaaagttgatggtcgagccggtaccgatgccgatatattcattttcgggtacgaattcgactgctttttcggcggcgatgcgcttgagttcgtcttgtgtcgtcatatttttgtcctttgggaaaccgtatcaacaaacagccgccatcttaacatttttttgcacgtcctgcccgccgcgttcaaatgcgtaccagcaataccgccgcctgcgcctctatgccttccatccgcccgagatagccgagtttttcgttggttttgcctttgatgttgacgcacgaaatgtctatgcccaaatcggcggcgatgttggcacgcatttgcggaatgtgcggcgcgagtttgggtttctgtgcaatcacggtcgtatcgacattgaccgcctgccaaccctgcgcctgaacgctttgatacgccgcacgcaaaaggacgcggctgtccgcatctttgaactctgcggcggtgtcggggaaatggctgccgatatcgcccaaacctgccgcaccgagcagcgcgtcggtaacggcgtgcagcagcgcatcggcatcggagtgtccgagcagccctttttcaaatgggatttcaactccgccaagtatcagctttctgccttcggtcagttggtggacatcgtagccctgtccgatacggatgttcgtcatcgtttgtgttcctgatgttttgaattgaagttcagacggcatcgagcagcagcctgacgatgtatgcgtcctgcggctgcgtcagtttcaaattgcgcacgtcgccctgtatcagtagcggacgcacacccaatttttccacggcggacgcttcatcggtaatgccgtccaagttttccgcagccaatgcgcggtgcagcagcccggcgcggaaaagctgcggcgtttgcgcctgccaaaggctcgtccgctcgacggttgcactaatgttcccaccgtccgcgcacttgagcgtatcggcaatgggaattgccaaaatcccgccttcggcggcgttgcccgcctgttctatcaaccgcgtcaaagcttcagacggcaggcagcaacgcgcggcatcgtgtaccagaatattgtcggtttccgccgccaaaccggtttccaacagttttgccacaccgttgcggacggtttcggcgcgggtctgtccgccgtttttccacacccgaacctgtggaaatgccgtctgaaccttatcggcaaacgtgtcttcgggcgagacgacaacgacggtcaaatcgacggcctcatgccgttcaaaaatcccaatcgtatgttctaaaacggttttgcttccgatttcgacatattgcttgggtttgtccgcaccgaaacgcgccccgatgccggcggcgggaatcagcgcgatatttttgcgcttcatgcgtccgtcccgccgttttcagacggcacggcttccttgcgccagatacaggcttcgcccaagccgtccaaatattgcccgtgcgccgccaactcgttttcgtccgccctgatgactttcagtttgccgctgcgtttggtttcggtatgcaccacgggtttggtttccattttttcctctgcggccgcacccatcaggtcgaactgccgccgcgtcatagcaagatagacttcgcccaaaagttcgcagtcgatcaatgcgccgtgcaggacgcgcttgctgcggtcgacggaaaaacggttgcacaaggcatccaggctggctttctgcccggggaacatttcgcgcgccatcgccagggtatcggtaacggtacagccgagttcctcaacggtcggcaaccccatccggcggaactccatattgaggaagcccacgtcgaatttggcattgtggataatcagttccgcaccgcgcaggaaatcggcaatctgcctgccgacctctgcaaacggcggcgcgtttttcccttccaaaacctgtatcgtcaagccgtggacgcgtgccgcctcttcgggcatatcgcgctcggggtggacatagaggtgcaggtttttgtcggtcatttggcggttgaccatttccaaaccggcaaactcgaccaagcggtcgccgccgtcggcatacagaccggtggtttcggtatcgaggatgatttggcgtgtcgtcatatcggtgtctttcttctatcttcgtaaattgcttattttttaagcaatgtatttttctgttttcatttcaatgcacaaacccacttattcacagtgtgttcacaacattgggcaggcggattgtgtattttggggacaattttttcagacggcattcaaggttttttcctgattgccgccgcgcctaaaaaccgcctttcgcgcttaatcaaaaataccgacaacggaatattgcccaaagcgacaatcagatacaacaaggaaatgctgtcaaacaaaaacagcaacaccgcgctcaaaacggcagcggaaaccataaaaataccgttaacgatattgttggcggcaacggcgcgggcgcggaaagtctcgctactggcggtttgcagccaggtatagagcggaacggagaaaaatccgccgaaaaagccgatcagcgtcatcaccgccatcacgggatatgcccatccttgcgataaaaaccaaaaaatgccgttcagcccttcaaaacggtgtccgtgcgtcagccacaccaaaaccaagccgcaaaccgtcaaacccaacgcaccaaccgttacccaagccaacatcaggcgttccctgctgaacttggcacacagtaccgaaccggcggcaataccgatggaaaacagagcaagcatcaggttgaaaacattgtcgttgccgcccagatggatttgggtaaaggtcggcagttgcgtggtataaaccgcgccgacaaaccaaaaccacgaaataccgataatggcggtaaaaacgggcttgtgccgcaccgtttcacgcagcagggattttgtgccacggacaatattccactcaatttgtgtatcggcagccttggcgggtacggacggcataaacaggctgccgaccgtgcctccgacggcgaccagcaaaaccagtatcccgacaatataaggcggtacacctgccaccgccgttcccaaaatctgaccgaacaggatggcgacaaacgtacccgattcaatcaggctgttgcccatcatcaactctttgtcgtcgagataatcgggcaggatggcgtatttcagcggcccgaacagcgtcgattgcgcgcccatgcaaaacagacacgccaaaagcagcggggcagaccggatataaaacccgtatgccgccaccgccataatgatcatttccagcaccttgacccaacgcgccaaaacggccttgtcgaatttgttacccaactgccccgacagcgaggaaaacaggaaatacggcaaaataaacagcaacgcgcccaagttcaacatctgtccggcaggcaggaagccgttttgccccaaaccgtaaaacccaatcatcacaaacagcgcggttttgaacacattgtcgttgaacgcgccgagaaactgcgtagcgaaaagaggtgcgaaacggcggcttttaaccagtcccaaaccgccttttttagcgtacatcgttttccctctctttttcaatcagtttacttgtcgaatcatcatccatcaggatgcggtgcgccggcccttccaagtcgtcaaactgcccgtttttgcccgaccaccaaaaaaaccagccgatgacaaacgccaaaataatgctgatgggcaccaatataaacatgctttccatcacatattccctgtcaaatcgttcaaaacaaaagtctgccccgacacggtcagatattcgttacgcaaagttccgacgggagcttcgtcaaaaaacagctcgatacggtctttgaccacgcgccaatattgggggatttccgtctgaccgaacggcgacaggacatgattttccattccgccttcaagtttgacggcaaaacgcccgctttgcggccgtgcttccgattcgtcgtcggcaagcaggatgaaaaagcctatatgccgtcccgattggtcatgaatactgaaataatgcataaatttcccacccgccttttttcagacgacaccaactaaaaacagggcgaatgtaccagtttggacgggaagaatgcaaagaaattctccctcccccagccgaaaacaccggcaaaccgcatatcccccttttttccgtcaaaatgcctgacttccgccattttcacgcaaacgcccgattaagccaagcaattgcaaagattttttgctagaatagcctgcttcttttatcaaccttttcagacggccccactactttcccgcccaggaaggcaaaacggattcggcacgaatccggttagtatccgtgtccgattccaatgccgtctgaaactttccggagtaagaaaatgtcccaaaaattgatcttggttttgaactgcggcagctcgtccctcaaaggcgcggtcctggataacggcagcggcgaagtcctgctcagctgccttgccgaaaaactcaacctgcccgatgcctacatcacattcaaagtaaacggcgaaaaacacaaagtcgatctgtccgcacatcccgaccacaccggcgcggtcgaagccctgatggaagaactcaaagcccacggcctcgacagccgcatcggcgccatcggccaccgcgtcgtcagcggcggcgaactgtacagcgaatccatcctcgttgacgacgaagtcattgccggcatcgaaaaatgcatcccgctcgcccccctgcacaaccccgcccacctcttgggcctgcgtgccgcgcaaagcattttcaaaggcctgcccaacgtcgtcgtattcgatacctccttccaccaaaccatgcccgaagtcgcctacaaatacgccgttccgcaggagttgtatgaaaaatacggcctgcgccgttacggcgcgcacggtaccagctaccgcttcgtcgccgacgaaaccgcgcgcttcctcggcaaagacaaaaaagacctgcgtatggtcattgcccacttgggcaacggcgcgtccattaccgccgtcgccaacggcgaatcgcgcgacaccagtatgggcctgaccccgctggaagggctggtaatgggtacgcgcagcggcgacatcgatccttccgtattcggcttcctcgccgaaaacgccaatatgaccatcgcccaaatcactgaaatgctgaacaaaaaatccggtctgctcggcatttccggcctgtccaacgactgccgcaccattgaagaagaagccgccaaggggcataaaggcgcgaaattggccttggatatgtttatctaccgccttgccaaatacatcggcagtatggcggttgccgcaggcggtttggacgcactggtctttaccggcggcatcggcgaaaactccgacatcatccgcgaacgcgtgatcggctacttgggcttcctcggtctgaacatcgaccaagaagccaacctgaaagcccgcttcggcaacgccggcgtgattaccactgccgacagcaaagccgttgccgtggtcattccgaccaacgaagagctgatgattgcccacgacactgcccgtttgagcggtctgtaaggttttatccgcacacgaactgcctccggaaatggaggcagtttttttatccggctttccatgcttaaacagcactgcctcttttcagacattgacggttgcagccgcttacctgaaccttatagtggattaaatttaaatcagtacggcgttgcctcgccttgccgtactatctgtactgtctgcggcttcgtcgccttgtcctgatttaaatttaatccactataatgattaactattttttaatcatgttattattttccataaaatacatgacattaagatgtttttccacaaaagatacacacaccggcaaacaccggctgtgtttatcttttcttatgcctattttttaatcatcgtatttttatcttttaatttcaatacgcaaactaacttatacacacggttttcacatctttagactgcttccgtgtgtatagtggatattgccgttttcctttctgacaaaaatgccgtctgagaacttcagacggcatttgaaacatcggaatcagcggttttgttcataccactcgataaacttgtctgctttgacaaaacccagcagcggctcgctgcggctgccgtcggagcggacgacaaacacgcccggcggcccgaacagaccgtattctttcaacaacgcctgatgttcgggcgtgttggcggttacgtcgatttggaaaaagcgttccatatcgactgcctgatgcacttccggctgattgagcgtgtaagccgccatttctttgcaggaaatgcaccagtcggcataaaaatccaaaacgacgggtttgtcgggatgttctttcaacgccgtatccatcgctgccttcagcgcggcagtatcggcaaacattttgccgtgttccgaagatttgcctgcttcggctggtggattgagggtcaggaaatggtgcagcgcggtcgttttgccgtttgcgccctgccagccgaaccacgcgccgcctatcagcaatataccgcccaatgcgaatgccacagctttcggacggcgtttctgcctgcgtccgttgaccagcagcataaaggcaggaaccagcatcagcagcgtgtacagcgcgacgacgagataatagggcaagtgcggcgtggcgaggtaaacggcgacggctagcaggatgaagccgaatgcgtatttgacggcattcatccaatcgcctgccttaggcaggatatgcccgccgaacgtgccgatggcaatcagcggaacgccggtgcccaacgccaaagtgtaaagtgccaaaccgcctaaaaccgcatcgcccgtctgaccgatgtagcccaaagcaaatgccagcggcggggcgacgcacggcccgacaatcagcgcggacaatatgcccataataaagacggaaacgattttaccgcctgaaagcctgctgctttgattctgaaaatacgactgcacggcgttgggaagctggatgttgaacagcccgaacatagacagtgccaagacgaccattaaagccgatgccgccaataccacccaagcctgctgcaaccatacggtcagcagtgcgcccgtcagtccggcaacaatgccgaccagcgtataagtcagagccaaaccctgaacataaacgacggacagcacaaacgcccgcgccttgcccgcctttttgtcgccgaccacaatactggaaacaatcggcaacaggggatacatacaggcggtaaaactcaggcccaaaccagcgagaaaaaacgccaaaagattggcgttgagcgtatcccaagacagcttgaaacggctgtcgccgccctcatcccccttcgggggcggcagcgccccgctgccgttttgagaggaaggctgcaaaaagcggtctttggcggatgccggttcgtcggtttgcggatggtaagtgccgttgccgaaaatatcaaactcggtatccacgggcggatagcacacgccggcttcggcacagccctgataggtcaaaaccaatttatacggttcgccgacagcctttgcataaggaaaggcaacctgcgcctcgtgatggtaaaccgtctgcctgccgaaaaactcgtcttccttctcttcgcccttgctgaaagaaggctgtcccaacaaatccgccggatcggtcttgccgacgattttcgcctgatacatatagtatccgtcggcaatcctgaaacggacgttcacaccgtcgtcggcaacggcaagctccggcacgaatgccttttccggcggcagcagatcgttcgcatccagcgcgaaagctcgtccgcacaacatcaaaaatacggcgaacaggcaaatcagttttttcataatcgaatccgtttcagacaaataatttgtctgcattataaatggtaaggttgacggtgggatttaatttatgtaaaacccgccattatccgaacctatttccataaacatcttatcgaacccgccatgtacgatgtcaatacccacgatgtccgccgctttttcgcccgcgtgtggcagcagcggctcaatccgctgcaactgagcgcactggaacagaaagccctccgcattgtcgaagcccatcccgaataccaccgttatctcgaacgcatcgaagaccatctggacaccgactggctgcccgaaaacggcgaaagcaaccccttcctgcatatgtcgctgcatctgtccgtccaagaacaggcgggcatagaccagccgcacggcatacgcgcaatccacgacaccctgtgcgccaaacgcggctggctggaagccgaacacgaaatgatggaggcactggcggaaacactgtggacggcgcaacgctacggcaccggtttggatgtcaatttctacatgacccgactgcgcaaactcatcggcttgggtgcagaagatcaagccagattgaacccgcatgaaatcgcctgaccataccaaccgcctgcaaaatgccgtctgaagcggaacaacccctttcagacggcattcattttcccccaatcatttccacaacgcctttttcagcataatcaaccaatccttcttatccaaaacggggcgttgtgcaaacacatcgtatcggcacgcgtccagtttctgcaaaatcaactgcgcccccaacacaatcatacggagttccaaaccgatacgcccattcagttcccttgccaaaggcgaacccgccttcagcatacggaacgcacgccgacactcatacgccatcagccgctgaaacgccgcatccgcccgtcctgccgcgatctgttcctcagaaacaccgaatttcaacaaatcgtcctgcggaatataaaccctgcctttttgccaatccacagccacatcctgccaaaaattcaccagttgcaaagccgtacagatgccgtcgctttgcgccacgcacaccgcatccgttttcccgtacaaagccagcataatgcgtccgacagggttggcggaacgccgacaataatcggccagctcgccgaaatttccataccttgttttaaccacatcctgagaaaatgcagaaagcaaatcataaaacggctgcaaatccaaaccgaacggcacaaccgcctcggcatccaatcgtgcaatcaaaggatgcgccgaccggccgcccgatgccaacacgtccaactcgcgctgcaaaccctccaaccccgccaacctggcttcagacggcatactgccctcgtccgccatatcgtccgccgtccgtgcaaacgcgtacaccgcgtgaaccggcttcctcaacctgcgcggcaaaatcagcgaaccgacgggaaaattctcataatgcccaaccgacataccttctccatccatcaaacaaaatgccgtctgaaacggaacaaacccttttcagacggcatcagatacctccaagctgccggcaatcagtggtggtgatgaccgtgcgggccgtggacatgaccgtgtgcgatttcctcatcggatgcatcgcgcacgctttcaactgtagccttaaagcggattttcatgcctgccaaaggatggttgccgtccaccaccgccttgccgtcggcaacatcggttacacgatagacgacaacatcgccggtttcaggatcgtcggcttcaaacatcatgccgacttcgacttcaacagggaacacgcccgcatcttcgatacggaccaactccggatcctgctcgccgaacgcatcgtcgggcgacagcgccacatcgaccgtatcgccggcatccttaccgtgcaacgcctcttccaccaaagggaaaatgccgtcgtaaccgccgtgcagatacgcaatcggttcttcggttttgtccaaaagctgattgttggcatcatacatctcataatgcagcgaaaccacggaatttttcacgatagccatatttgtcctttcaggaacagcagattaattacaggcgcattctaacacaaccgccgcgccggccgattaccgttaacctgttcataaactgtacagcacatatttcaatgtaaatctttgttattttattgcggtgtaacttttttacaacattcttaaaaccattccgacctgtctgccgactttcccaatccgccttaataaatcatacaagatactgaaattatattaatctctataatatttatccctatcgaatttttaacagcaaaaccgttttacaggatttatcaatccgcccgccagaaaacttttcattcaaacctttttcccatctgtacgacattgcaatcccttattccatagtgcataattacgcaaattcagcgatgaatttccaacccggtttgtagtatggtcgataaagacctatttgtttcaataatttaaattggttctaaaggttactaaaatgaaaaaatccctgtttgccgctgctttgttgtctttggttctggcagcctgcggcggtgaaaaagccgctgaagctcccgctgctgaagcacctgccgccgaagctcccgctactgaagcacctgccgccgaagctcccgctgctgaagcacctgccgccgaagctcctgctgctgaagctgccgctaccgaagcacctgccgctgaagctgccgctaccgaagcacctgccgctgaagctgccgctaccgaagcacctgccgctgaagctcctgctgccgaagctgcaaaataagcattttccgcttgcaaaaaagcaggatacgttcagtatcctgcttttttgatttttcagacggcatcagattcccttcctcaatcttctccctacccttccgacaaacatgcttgaccttcataccgaattttcccgactcctaccggcagatgaaattgccgaaccttctccgacgcttttaaaagaccagcgcaaccgctttacgtctgcaccagacatcattttgcagccgctcagcgttaaaagcgtgcaaaccattatgcgtttctgccaccaacaccgtattccggttacgccgcaaggcggcaatactggtttgtgcggcgcggcagtatcggaaaacggcgtattgctgaacctttccaaactcaaccgcatccgcagcatcaatttgtcagacaactgcataaccgtcgaagcaggttccgtactccaaaccgtccaacaggcagccgaagcctcaaacaggctgttcccactcagtctcgccagcgaaggctcgtgccaaatcggcggcaacatcgcctgcaatgccggaggtttgaacgtattgcgttacggcacgatgcgcgacctggttatcggtttggaagtcgtcctccccaacggcgaactggtttcccatctccatcccctgcataaaaacaccaccggctacgacctgcgccatctgtttatcggtagcgaaggtacattgggcattatcactgccgccacgctcaagctgtttgccaaccccttagacaaagcaaccgcatgggtcggcatacccgacatcgaatccgccgtccgcctgctgaccgaaacccaagcacactttgccgaacgcctatgcagttttgagctgatcggccgttttgccgccgaattgtcttccgaattcagcaaactccccctgccgacacattcagaatggcatattttacttgagttgaccgactcattacccgacagcaatcttgatgatcggcttgtcgaatttctttataaaaaaggctttaccgacagcgtgttggcgcaaagcgaacaagaacgtatccatatgtgggcgttgcgcgaaaacatctccgcatcgcaacgcaaactgggcaccagcatcaaacacgatattgccgttcctatcgggcgcgttgccgactttgtccgccggtgcgccaaagatttggaacagaatttcaaaggcatacaaatcgtctgcttcggacatctgggcgacggcagcctgcactacaatactttcctgcccgaaatcctcagcaatgaagtctatcgttacgaaaacgacatcaacagcacagtctatcgcaacgtccttgcctgcaacggcacgattgccgccgaacacggcataggtatcatcaaaaaacagtggctggacaaagtacgcacgcctgccgaaatcgccctgatgaaaagcatcaaacaacaccttgatccatataacattatgaatccgggcaaactgcttccgtaaccggcatttctgatttgcatacacaacaaagaaagggacaatagatccgattgtcggtttagcgcgagctcgtgagtgcggttaaaaattggtggaaattacacgaaaaatgaccgcacttttaaaataaaaaaatcggcagtgaatttccctgccgattttattttgttacaacttaacttaaaacgtccactgtaaattcaacgcaccttgtttagcttgatgatgtttgcctgtttggcggttgaatgtggcttgtaaggttaagtgagatttgattttcactgctacacctaattggctctcaattgccgtcttattgtttatcactcgacgctctccgtccatttccacaccgaaaggtttgttgtggtaaagcgcgttcacagcggcgaaaggttcaatagcgatatttttatagagtgaaaattgagctttagcttgaacgccaacccgagtttgtaattggcgggagccaagtaaattcacgtgggcattttcgctatcgctgaattttccgtttacccccaaataagtcaattgtgcctgtggttgtaggtaaacacgaaggctgttgccctttttagtgaagtgttccgccaataacgcattgtaacctgcttcaattgaggcagtaataccttttgaagtaaaacgttctgtaccatcttcagtgttgatacggtggcggaagcgttgatattgcatccagctatccgcatacgcacctgtctgtttgtcctgaagttggtgccaagtggcgtaaacgcctgcaccaaagcctttcacatttcccgttgtaagattgtctgtatctgggttgtggaaagtgctacgttgttctgcttgtccgcccattaagccaatagaaagttgattactttcgttttgccatgtgaatacttcgccgccgagttgcacacctttacgatagccttctacaggtgctgttttgccttgcacccattggttggaatgtccgtcaatcacacgcaaccacaagcctttgcgtggtaaagtgcggtcgaaaatatcgctgtttttgttgttcaaacgcaaggcgaataaggtattggcggcttgagcctgttgtgcataaatcgccatatcatcgcgttcttgcactttggtaaaaaagccctctgggcgttgttgtaaagaaagcgtataaattcccttttggtgtttgccagaaagacggaatgcgtgtttatctgctgtgccatttactttgataatttgatgcccatcgaggctttttaaatcgtctattggattttcgaagatgatgtcggaagtgccagtaacatttttctcaaaaattaatgcagtatttttcgcttctttaggatcgtaagcaaaacgaaaacgagctccgccagcataatcttcttttacgagtaaactttcacttttagtattaaaacggatgtctgcattcgttgtttttaatttcccaacattagaatcccaacggggctcccagagagaattttctaagcggaattcatccaaactaatcgtttgcccgataacgtgcgagttgtctgtaacctcaatatagtggaatggatctaaaccagaatatagatgtgctgcaaaagaaacataattttcaatatgatgaattacttgattagcccattctgtataattcccgacagataaaatttcgctgttgatatgactattttttatttttggacctaaggagaatatatgactttttactataagaggatgggatccaaatttttcagcttggcaagtactataatcacgtatcttagtgttagaattaaaacattccttaaaatatttccgtatttgttcttctgtgtccccatttctttttgcaacccctaaacctcgggcgaagccaactaggtaaccttcggtatattcttgatcataaaaagaaatcttttttgagttattgatgttttcgaattggtatgttctagggtatagtgcgggaaagggtggaacttttggattatcctcggttataagataagtttcttttttccaatattcactcgttttatcgcggagtttttttaagcgggtaatttcatcattagtgagcttggttttgtcgtaaacgtaatcaacagccaaaagcggagaggtataaagaatagaaaaaaatagacttacaataaatgattttttaaacttctgcttgcttgcttgcttgcttcgagtttcataataaattttcctttgtcaagtaaaaataaatggggcgtggattttagcataaaactgaacaaaaaatgtcatttatctcacatttttctctatttatttcttgtttattaaaagtaaacgtttgctttttgctattttgtcaagccagtttgaaaatgtgtataattgccctcgttatttacaaaaatttcaggaaaaatgaccgcactttacccttggctaatgccaatttatcatcaaattgctcaaacctttgacgaaagcttggggcatcatgccgtgctgattaaagcggatgctggtttaggtgtagaacgtttacacatcaggcggcagccttgcccataccgtctgaagcactgtttccacaatcagcgcgtatgcttaatcaaccgctgtttctcgcgtttccaatccgcctctttcatactctggcgtttgtcgtgctgtttcttaccttttgccaaaccgatttccatcttgatttttccgcgtgaaaaatgcaaatccagcggcacgatggtgtagccggcacgttcggttttgccgattaatttgttgatttccgactggttcaacaagagcttgcgcggacgtacggcatctggtttaatgtgtgtcgaggctgtgggcaaagccgtaatatggcagccgaccagataaaacgcgtcttttttccaatagatataactctctttaagctgtacgcgcgcggcgcggattgctttgacttcccagccttccaagaccaaaccggcttcaatccggtcttcaatgaaaaaatcgtgaaatgcttttttattgttcgcaatagccataaacatcctatcaatatccgccgtcagacggcataaacccgaaaacagaacccatcataccgcctcttcaaccgcctgcacaatcttctcgggatacagcctgttgaggcagtcggtatgccccagcggacattcccgcttaaaacacggcgaacattccaagtgcaggctgacgattttcgccctatcgctcaaaggcggcgtatgcgtcgggctggaagaaccgtaaaccgccaccaccttcctgcccaaagctgccgccaaatgcatcaatccgctgtcgttacacacgaccgtgtccgccaacgacagcaaatccattgcctgcgacaaatcggttttgccgcacaaattgacacacataccgtctgaaaggcggttgatttcctcggcaatttcatcatctttttgcgaaccgaacagccaaacctgccaacccgccgccagataatgtttgcccaactcggcaaaatgccttgtcggccaacgctttgccggcccgaattccgcacccggacaaaaagccagaacaggctttccaatatccaagccaaaggtttcgacagaaatttcccgccgccgttcatcaatggaaaactcggggaatcccgaatgcccgtcaaaatcttcctgactcggatgcgcgagagccgtatatcgatccaccatcaaaggcagacgttccttatccagcctgcgtatatcgttcaacagaaaataacggctttcaccgacataacccgtccttttaccgatacctgtcgccagcgcgatgattgccgatttcaaagaaccgggcaacacgataacctgatcgtatccgcgccgccccaaatccctaccgacccgccaacggcgtttcaactccaacgcaccatgtccgaacgaattctcaagaatttcattcacttccggcatacgctcgaacaccgccatcgaccacttcggtgcgaacacatcaatcgtgcaaccggggtgaagttccttcaaacggcggaacaagggctgggtcatcacgcagtcgcctatccaactgggggaaataatcaggattttgatggacataacaagaaaccgaaatcagacaggcagaattttaccgcgaaaccgttggaaaacctatcttgccgcattccgaacgccggacgtgcaaatatgaaaaagcccgaacattcaagttcgggcttcaaaattctggctccccgacctgggctcgaaccagggacctgcggattaacagtccgtcgctctaccgactgagctatcggggaatggggcgtattatagcgtccggaaaaaatgtgtcaatccttaattttggaaaaatgggcgacaaaacgacaagcatatgaatcagaaagacattaagaccgatgccttaaaaggattgccgttgtatgaatttccacagccgtcatcacaccatatttaagcccgatgagccgttctgccctccccccgcttaaaacaatgccgtctgaacttcgccgtgttccaaagccagtaaaaactgtttgcggttcaacccgcccgcgtagccggtcagtttgccgtcgctgccgatgacgcggtggcagggaatcaggatagatactttgttctgcccgttggcggcggcaacggcgcggacggctttggggttgcccaaacgctgcgcctgctccttgtagctgcgcgtttcgccgtaaggaatcgccaagagcgcgtcccatgcctgcttttgaaactcggtgccaatctgctccaaaggcgtggcaaaggttttcagacgacccttgaagtataagtccaattcctgccgcaaaagttgcgtccgctcatcctcccgaaacacaaaccgtccgcgcaaggctttttggacggcggcaatttcctgttccaaatgcttctgtccgacaaattccagcaaacacaaacccctgctaccgaacaccgccagcatctcgcccaaaggcgtggcaatggcggcacacaccagctcgttcaaactgtcgggataacgcgcttccaacagacggatggcgcggcggatgcggacatattcttcaggcgcgcagccgatattgtcccaaaaatcccgctcgaactgtttggcttcgcattccgtcagattgggatgcggcataacgccgcactcaaaaacccgagattcgagccaatggcggatttcatcccattttgacggcagattgtttaaggaaggcagggtaatcatttgtttgctccgtatccctatcatagatttgacggcaaaatccccaatttttgccattcccgcacgccggagcaggaacgggctatgacgtaaatcttgagggttaggttgcggcaatacctaaatattcgatatttctaaagcatcagagaaaggaatgtttcaacacacaggacgacacataaagcgccgccccatgaaaaatttcagacgacctgcaaagggtcgtctgaaaccacgatttttgcatttgcgcattctggcacatcatccaaccgtttcggcacattcctgccgccgttgacagcctataatgaatccacttattcatcaagcaaaggaatcatctatgcaaaccctcatcctctccgccgtactgctggctttttcaaccgctgcctttgccgggggcgcattcacgctgcaattcgacaacccgtccgaagacggcggcttcacgcaaaaccagcttttgagcgcgccttacggcttttgctgttcaggcgacaatgcttcgcccgcgctgtcgtggaaaaatccgcccgccgggacaaaagtttcgtcctgaccgtttacgataaagacgcgccgaccggactgggctggatgcaccgggtggtcgccgacattcccgccgatgtccaccgccgcaacgcgacctcgctgcaattaagccgctgcgccaacatcgccgaccggactgggctggatgcactgggtggtcgccgacattcccgccgatgtccgccgccgcaacgcggcctcgctgcaattaagccgctgcgccaacatcgccgacgaccagtccgcagccatatcggcggtaatcagtttgcggatttgccgcatcaggttgacgccttcgtacacggcaaaaccgatgccgtcatgctgcaaccacgccaacacgccgcaaagcgcggcctccgcagcattgtgcggcacttcttcatccgccagtaccgcagcctcataatcaaacgccgcgcccatacgcccggaatacggcagctttaccgcatcgcacactgcctgcgccgtcccgtattgtgcggcgaacctttctacggtttcctgttcgaaagcaatccattgcgcctgatagaggccgtctgaatcgggaatattgatgacgtcaaacgtctgtccgcctgccaaggcgaccgccttacccgccgcagcttcttacttccgcgccgcacgataagcacagccggttcatataccgccacgctgcggtacaaggcggtatgatgttgcacgatgccgcctaaagcacccaatcgttcgcgcgtatgaaagtatagtggattaaatttaaatcaggacaaggcgacgaagccgcagacagtacaaatcgtacggcaaggcaaggcaacgccgtactggtttaaatttaatccactatatctcaaacccacgttaggtctaagcaaatggtcggacatccttatccgacagcccatcttcttttcagacggcattgcaaatttaagtttgacgtgcgttcaaaataaggcagttaatgcgaagcgaaattccgtcggcgtacctgcaacttggcccctcccctataggggagggtcggagggagggtaaaacggggcagatacagacaatatttccgttgccgccccgatgccctctccctaaccctctcccacgggagagggaatggattgccgttgaaataaatcgctctacataaaaaatcaatgtgttatctcaaacccacattaggtctaatcaaatggtcggatatccatattcggcaagcaagctgctttcagacggcatttccagccaacaagcgcgccaatatcccctcatacaccgcagacagcttcggaatgtcgtttagccgcacgttttcgttgatttggtggatggtcgcattggacgggcctaattcgataagttcttgcgcaatggctttgatgaagcgtccgtccgaagtgccgccggtggtggacaattcggcctcaatgccgcaggtttcggcaatggctgcgcgtgccacgtcggtcagtttgcccgcttgggtcagaaagggctgccccgaacacgaccactgcaaatcgtattgcacgccgtgtttgtccaaaatggcgtggacgcgttgtttcagccctgcttcggtggactcggtggagaagcggaaattgaatttgacgttcagctcgcccggaatgacgttggtcgcgcctgtgccgccgttgatattggaaatttgaaagctggttggcgggaaatattcgttgccttcatcccagacttcctgcgtcagctctaacaaggccggggcaaaagtatgcacgggattgattgccaaatgcggataggcaatatggccttgcttgcctttgacggtcaggttgcccgacagcgagccgcgccgaccgtttttaatcatatcgcccaatttgtccacggcggtcggttcgccgacgatgcagtagtcgataagctcgtcgcgcgctttcaatacatcgacgactttggtcgtgccgtccaacgcgtcgccctcttcgtcggaagtaatcagaagcgcaatgctgccttggtggttgggatgtttggcaacgaagcgttcgcaggcggtaacgaaacaggcaatgctggttttcatgtctgccgcgccgcgcccgtataatcttccgtcgcgctcggccggttcgaacgggggcgaatcccatttttcgacaggacctgtcggtacaacgtcggtatgccctgcaaaacagacgacgggagctttcgtgccgcgtcgcaaccagatgtttttggtgtcgccgaaatggagttcttcagccgcaaaaccgattttgtgcaggcgttcggcaaggagtttttggcaatccctgtcgtcaggggtaacggatggtcgggaaatcagctctttggcaagctctagggattgagtttcggtcatatttgttcacttttgaaattagaccgtctgaaacgttctgaatgtgattttcagacggcatttaggttaggttggcatacggggtgggtattttacccatcagtcttctgaatcatttgccgtggcaggcttcgtaaagcggcagcaaatcttccaccgtttccgctatccatttcgcgacatcctgcctgcccaaatcgtcgcgttcgatgtgtttgccgatgcagaaaaagtcttcgtcgttttgcaactttcggtcggactcgttttgttgcgcgacggtgcggtagtcgtcgtattcgctttccgcaccgtgccacatatcgaaagaagcgtatttttcggtatcaaaattatccaaccagcggttgtaatcaggcagcgcgatgggggaaacatcggctttatagcagtgccaatccaagctgacgctcagacggcggcggttgagcagtatcgacaaaatcgctgcggaatttttatattgttcgtatttgaagtaggcaaagaaatgggcgcgaacctgccagccgttacaccagcgttcgatgtgcggcggcgcaaacggcgcacccaattcggcggcaacctgctgaatcagctgctgccatatctgccagttttctttatagtcagccttgatttgcggaatgctttcaggctggtattttttaagctgggaaaattggaaaaacgggatattgaacaaatcgcaacttttcggggtcagcataatatatccttgagacgattgtttcagacggcattatttgcgccggcgcgccgccataatttcgccgatttcggtcagtttttcttttgggataaaggtgttgcccatatcaaacagcggctcttcaatcgccaaatgaacatcatatcccgccacaaaacgtttgaacgcttcctcatcggggacataagcgttgtctgcttcgagtttggcaaattcggcggaaacagccgcccagttgtcgtgcagcccgatatgttggcgcaaaagctcgtccacgctttcttgggcttgcggcgcatattgcagcagcagcgggaagaagttttcttcttcgtcttcatggtgcagcggcgcggcaacgttgaaatactgggcgatttggcggatggtttgcaaaacaatctgattgcagccgttttcggcgatatagtccgacagcatggcgacttgtccgcaaaaacggcgcactttgccgtggcaggcatacagcatttcaatcggttcggcaaaggtaacgcttttggtttcaaacggattcatgttttcgttctcaacgggcacttttcaagcagtcattttataataaaacagcctgcacaaagcaggctgtccgtcttttgagactttaagcggattaatcgaccaaagtcactttgccgttcatcaaagcaccgtgacctgggaaggtacaagcgaatttatattcgccgtcggccaatttagcaggatccagagtcagggaagcttcttcgccgccgccgatcagtttggtatgggcaacaacgcgtgcatcatcaggtttgacatagtcggtatcggcagcacctacgccgtctttaaatacgccgtccatgtcttcagctttggcaatcacgagattgtgacccatgctggctttgggttgcgtaccggtatgtttcagagtgatggtgaactctttacatgctttgctgacttggatgtctttggtgttgaactgcatattgtcgttggattcgacagttgccgcacagttgccggcagcaggggcttcggcagcatctgcaggagcagcttcggcggcaggcgcttcggaagcgggtgcttcagcagcaggagttgcctcggcagcaggcgcggcaggttcttgagagcaggcagccaaaccgataacggcggcagaaatcagagccagatacgctttcataacaaatctccaatcgataaaataatattcggttttacagaaatcaaagtgcaaccgccattaacaaaaccttgaaaaagattccgccgcgttgcacaaacagatgtttcggagcggcattttgctacaaatttcatttgaaatcaaagcctgtttgcaagtttacaatcgtttacccaaaaaagggcaattttaccccgaacctatttctttagtattagacctattatcctttacttcttaatattaacggatgtttacacaaattcccgtatacattttatgcgccatgccttctaaccaagtttgccaatgcctccgccaattcgggatgccgtttttccaactttgccgccgccgaaccgaaactctccagcgcagccttactcaaatgcagggtattggttttcggcggtttttccggtttcgggaccagcctgaccgaaacagagcgtatcgaagcatcaagccctgccaactgcggcaataccgacggtgcaatcattttcaagcgcgatgccgccatattgtttgccgccaaaaggacaagcctgccgtcttcgatacatgccgtctgaaaatgcgggtgcaggttggcaggcagcagttttttcacggcggcatccaaccgccgccactgtcccgcctgtttcaaaagtccggaaagcagcgcgtcccgcctgcccaactgttccaaattcataaaacatacacccaaaaagattgaaataccgcaaacgcgcctttatttcagacggcattagcactttgcacaaacgcttgtgttaaaatcgcgttttcgcccactattatatcaggcgcaggaattattcatgctgacaaacattgccaagaaaatcttcggcagccgcaacgaccgcttgctgaaacaataccgtaaatccgttgccagaatcaacgcgctcgaagaacagatgcaagccctaagcgatgctgatctgcaagccaaaactgccgaattcaaacaacgcctcgccgacggtcagactttggacggcattttgcccgaagccttcgccgtctgccgcgaagcgtcccgccgcaccctcggtatgcgccacttcgacgtgcagcttatcggcggtatggtgctgcacgacggcaaaatcgccgaaatgcgtaccggcgaaggcaaaaccttggtcgccaccctcgccgtctatctcaacgcgctggccggcaaaggcgtacacgtcgttaccgtcaacgactacctcgcctcacgcgatgcgggcattatggagccgctctacaatttcctcggccttaccgtgggcgtgattatttcagatatgcagccgttcgaccgtcaaaacgcctatgccgccgatatcacctacggcaccaataatgaattcggcttcgactacctgcgcgacaatatggttaccgaccaatacgacaaagtgcagcgcgaattgaattttgccgttgtcgatgaagtggattccatcttgattgacgaagcgcgcactccgctgattatctccggtcaggcggatgacaacatccagttgtaccaaatcatgaacaccgttccgccccacctcgtccgtcaagagacagaagaaggcgaaggcgactattgggtcgacgaaaaggcacatcaggtcatcctgagcgaagcaggtcacgaacacgccgagcaaatcctgacccaaatgggattgctggcagaaaacgactccctctattccgccgccaatatcgccctgatgcaccaccttatggcggcattgcgcgcgcattccctcttccacaaagaccaacattacgtcatccaagacggcgaaatcgtcatcgtggacgaattcaccggccggctgatgtccggccgccgctggtcggagggtctgcatcaagccgtcgaagccaaagaaggcgtggaaatcaaacgcgaaaaccaaacgcttgcatctattaccttccaaaactatttccgcctgtacaccaagctctccggcatgaccggcacagccgataccgaagccttcgagttccaaagcatctacaacctcgaaaccgtcatcattccgaccaaccgccccgtacagcgcaaagacttcaacgaccagattttccgttccgccgaagaaaaattcgaagccgtcgttaaagacattgaggaatgccacaaacgcgggcagcccgtcctcgtcggcaccaccagcattgaaaactccgaactggtatccaagctgctgacccaagccggactgccgcacaacgtcctcaacgccaaagaacacgaacgcgaagccctgattgtcgcccaagccggcaaagtcggcgcgattaccgttgccaccaatatggcgggacgcggtacggacatcgttttaggcggcaacctgaagcaccaaaccgatgccatccgcgccgacgaaaccttgagcgacgaagagaaacaggcacaaatcgccgcactcgaagacggctggcaggcggaacacgacaaagtgatggaagcaggcggtttgcacatcatcggtacggaacgccacgaaagccgccgcatcgacaaccaattgcgcggacgttccggccgtcagggcgaccccggatccagccgcttctatctctcctttgaagacccattgctgcgcttattcgcactcgaccgcgccgccgccatcctcaaccgcctcgcccccgaacgcggcgtcgccatcgaacacaacctgctgacgcgccaaatcgaaggggcgcaacgcaaagtcgaaggcagaaacttcgatatgcgcaaacaggttttggaatacgacgacgttgccaacgaacagcgcaaagtcatttacagccagcgcaacgaaattctgaccagcaaagacatcagcgacctgatgcaggaaatccgttctgatgtcgtcagcgacctcgtggatacctatatgccgcccgacagcatggaagaacaatgggacatcccgactttggagaaccgtctggctgccgaattcagactgcacgaagacatccaatcctggctgaaggcggacaatgcgattgacggtcaagacatcaaagaacgcctgatcgaacgcatcgaaaacgaatatgccgccaaaaccgaactggtcggcaagcaggcaatggccgatttcgagcgcaacgtgatgttgcaggtcatcgacaaccaatggcgcgaacacctcgccgctatggactacctgcgacaaggcatacacctgcgcagctatgcccaaaaaaatccgaagcaggaatacaaacgtgaagcctttaccatgttccaagacctgtggaacggcatcaaattccatattgcctccctgcttacctcggttcaaatcgaacaaaaccctgtcgcggtggttgaagagcaacccatcggcaacatccagtccatccattccgaatcgcccgatatggaagaacttttgggtcagtcgcaaaccgatctggttaccgaagcctttaatcccgatgggacagatttcagccccgaagccttggaagcgcgggggcaaatcgtccaccgcaacgacccctgcccctgcggcagcggtttgaaatacaaacaatgccacggcaaactggcttaagcgtttgaacgcaaatgccgtctgaacatcccgctcccgtttcagacggcattttgcctgaaccgccacatccgactgccattccgaaaaatcccgatttcgtaccgtccgtaccaaaaacagacatcccgtccgccccacatcatgattccatccgacttcattgacgagcttttagccaaaaccgatattgtcgatattatcgacgagcaggttccgctgaaaaaaggcggggcgaactatatggcgtgttgcccgttccacaaggaaaaaacgccgtcgttttcggtcagtccaaccaagcagttttaccattgtttcagttgcggggcacacggctcagcgattggttttgtgatggaacatcagggactgtcgtttccggaggcggttcagttccttgccgaccgcgtgggtatggtcgtgccgaaagtgcacgggcaaaacgataatcccgaagtccgtgccgaacgtaagaaaaaacagcagacactggaggaaacgacggctgcggcagctgatttttacgcgcaacagctaaaattcaatccagcggcaaaagcttatttggacaagcgcggcttgagtgcagaagttatcgcgcattatggtttgggctatgcgcccgacggctggcagcctttgacgcaagtgttccaaccgtatcctaataccgcgttagtggatacggggatggtgattgacaatgagggacggcattacgaccgcttccgccatcggattatgttccccatccgcaatccgcgcgggcaggttatcggtttcggcggcagggtgctggacgactcgaagccgaaatatttaaattctcccgatacgcctttgttcgataaggggaaaaacctttacggactgtatgaagggcgtgccgctgtcaaggaagcggggcggattttggtggtcgaaggctatatggacgtggtcgcgctggcacagttcggcgtgggctacggcgtggcggctttgggtacggcgacgacggcggaacacgtcaaaatcctgatgcgtcaggcagacagtatttatttctgtttcgacggcgacagcgcggggcgaaaagcggcttggcgcgcgctggaaaacgcgctgccgcagttgaaggacgacaaatcgctgcattttttgttcctgccggaagaacacgaccccgacagctacatccgcgcctacggcaaagcgcaatttgaagacgcgcttctgaatcaaagcaagcctttgtcggagtatttctgggaacacctttcagacggcattcatctcaatacgcaggaaggcaaggcggaattggtaaaaaccagttcgccgcttttggcgcagattaccgcgccggcattggcttatttgttaaaacaacggcttagcgagctggtcggcatcgaccccgacaacctcgcgcaactgctaggacaggaagcgccgaagcggcacgtcaaacaaaaaaactacaaactgcctccgatttccgtcaaacagcccgtcatgctgacgctggtacagcggcaaatccgcagcctcttgataaatccggattgggctgcatatatagacctgcccgattatctggcgttggacggtgatttcgcctgccttgccaatcttgccgaatcgattaaaaaccatgccgccgtacccgaaaccgctcaggttttagagtatatgcgcggctcgccttacgaagaaacgataacccgaatcttccattcaacgcaccaatcggaagaaatgaacagcagcagtgaagaagattgcgagaatttccaaatcggcatgaaaaaactgctcaatgagttaaaatacagccaaatcgaaacattaaaacaaaaaagcctgcaatccggcttaaatgaaagcgagaaaaaacttttgctgtcgctgctgaccgcaaaacaaaattgaccggcggattccgccatccgtaaaccgttatgccgtctgaaaagcattcaccccggctgcaacaacgacacctgcagaacacccatccccaaaagccttcagacggcatcagagtaccctactctgccacgccttcaggtgcgtccaaacgcaaaccgtcggcatcttaccaacagaaagcagacaatgtccagaaaccaaaatcacgaagaatatcaagacgacacccgtccgttaagcattgaagagcaacgcgcgcgcctgcgtcagctcatcatcatgggtaaagaacgcggctacatcacctactccgaaatcaacgacgccctgccagacgatatgtctgatgccgaccaaatagacaatatcgtcagcatgatttccggtttgggcatccaagttaccgaacacgcccccgatgcggaagacatattgttaagcgacaatgccgccgttaccgacgatgatgccgtcgaagaagccgaggccgccctttccagtgcagattccgagttcggcagaaccaccgaccccgtccgtatgtatatgcgcgaaatgggacaggtcgacctgctgacccgcgaagacgaaatcatcatcgcaaaaaaaattgaaaacgccctgaaaaatatggttcaggccatctccgcctgcccgggatccattgctgaaatcttagaactcatcgaaaaaatccgcaaagacgaaatccgcgtcgacgaagtcgtagaagccattatcgacccgaatgaagtattgctcaacgaattgggcttggggcacttggaaaccacagcgcccgagaaaccttccaacgacaattcggacgaaaacgaagacgacgaagaatcggaagaagatgcggatgaaatctcggcagccaatctcgccgaattgaaacaaaaagtcatcggccactttgcccaaatcgaaaaagactacaaaaaaatgattggccgtttggaaaaacaccacagccggcacaaagactatctcgcctaccgcgacgcgattgccaacaaactgctggaagtccgtttcgccacccggcaaatcgacagcctcagcagcagcctgcgcgggaaagtagaaaacatccgcaaactcgaacgcgaaatccgcgacatctgcctcgaccgcgtccatatggaacgcgactacttcatccaaaacttcctgcccgaaatcaccaatctagaatggattgaagaagaaatcgccaaaggcagggtttggagcgacgcgctcgaccgcttccgccacgccatcctcgaaaaacaaaccgagttggcggatatggaaaaagaaacccgcatttccatcgaagagttgaaagaaatcaacaaaaatatggtgtcgagcgaaaaagaaaccgcagccgccaaacaggaaatgattcaggcaaacttgcgcctcgtgatttccatcgccaaaaaatataccaaccggggcttacaattccttgatctgattcaggaaggcaacatcggtttgatgaaagcggtcgataagttcgaataccgcagaggctataaattctccacctacgcaacctggtggatccgccaggcaattacacgctcgattgccgatcaggcgcgtaccatccgcattccggtacatatgattgaaaccatcaacaagatgaaccgcatctcgcgccaacaccttcaagaaaccggcgaagaacccgattccgccaaacttgccgaactgatgcagatgcccgaagacaaaatccgcaaaatcatgaaaatcgccaaagagccgatttcgatggaaacccccatcggcgacgacgacgattcgcacttgggcgacttcatcgaagatgccaacaatgttgcgccggccgatgcggcaatgtacaccagcctgcacgaagtaaccaaagaaatcctcgaaagcctgacaccgcgtgaggcaaaagtcctgcgtatgcgtttcggcatcgatatgaacaccgaccacacgctggaagaagtcggcagacagtttgacgtaacgcgcgaacgcatccgacaaatcgaggcaaaagcactccgcaagctgcggcatccgacaagaagcgaccgtttgagaagtttcttggacagcgaagacagcaagctgtaaaccaaaaaaccgcaggtttcaaatacctgcggttttttcttacacaataaacaacgcttccacatatcccacactcctatcccgagacctttgcaaaattccccaaaatcccctaaattcccaccaagacatttaggggattttccatgagcaccttctttcagcaaaccgcacaagccatgattgccaaacacatcgaccgtttcccactattgaagttggatcaggtaattgattggcaaccgatcgaacagtacctgaaccgtcaaagaacccgttaccttcgagaccaccgcggccgtcccgcctatcccctgctgtccatgttcaaagccgtcctgctcggacaatggcacagcctctccgatcccgaactcgaacacagcctcatcacccgcatcgatttcaacctgttttgccgttttgacgaactgagcatccccgattacagcaccttatgccgctaccgcaactggctggcgcaagacgacaccctgtccgaactgttggaactgattaactgccaactgaccgaaaaaggcttaaaagtagagaaagcatccgccgccgtcgttgatgccaccattattcagaccgctggcagcaaacagcgtcaggccatagaagtcgatgaagaaggacaagtcagcggccaaaccacaccgagtaaggacagcgatgcccgttggatcaagaaaaacggcctctacaaactcggttacaaacaacatacccgtaccgatgcggaaggctatatcgagaaactgcacattacccccgccaatgcccatgagtgcaaacacctgtcgccgttgttggaagggttacccgaaggtacgaccgtctatgccgacaaaggctatgacagtgcggaaaaccggcaacatctggaagaacatcagttgcaggacggcattatgcgcaaagcctgccgcaaccgcccgctgtcggaagtgcaaaccaagcgtaaccgatatttatcgaagacccgttatgtggtcgaacaaagcttcggtacgctgcaccgtaaattccgctacgcccgggcagcctatttcggactgattaaagtgagtgtgcaaagccatctgaaggcgatgtgtttgaacctgttgaaagccgccaacaggctaagtgcgcctgttgccgcctaaaaggcagcacggatgcctgattatcgggtatccggggaggattaagggggcgtttgggtagaattaggagatatttggggcgaaaacagccgaaaacctgtgtttgggtttcggctgtcgggagggaaaggaattttgcaaaggtctcatcctgttattttcacaaaaacagaaaaccaaaaacagcaacctgaaattcgtcattcccacgaaagtgggaatccagtgcgttgagtttcagctatttagaataaattttgaaactctaatcgcgtcattcccacgaaagtgggaatccaggacgcaaaatctcaagaaaccgttttacccgataagtttccgcaccgacaactctagattctcgcctgcgcgggaatgacgaatccatccatacggaaacctgcatcccgtcattcccacgaacctgcatcccgtcattcccacgaaagtgggaatccagttttttgagtttcagtcattcccgataaattgccttagcattgaatgtctagattcccgcctgcgcgggaatgacgggatttgagattgcggcatttatcaggagcaacagaagccgctctgccgtcattcccacgaaagtgggaatccagttttttgagtttcagtcattcccgataaattgccttagcattgaatgtctagattcccgcctgcgcgggaatgacgaatccatccatacggaaacctgcaccacgtcattcccacgaacctacattccgtcattcccacgaaagtgggaatccagttttttgagtttcagtcattcccgataaattgccttagcattgaatgtctagattcccgcctgcgcgggaatgacgaatccatccgtacggaaacctgcatcccgtcattcccacgaacctacattccgtcattcccacgaaagtgggaatccagttttttgagtttcagtcatttccgataaattgccttagcattgaatgtctagattcccgcctgcgcgggaatgacgaatccatccgtacgaaaacctgcaccacgtcattcccacgaaagtgggaatccagttgcttgagtttcagtcatttccgataaattgccttagcattgaatgtctagattcccgcctgcgcgggaatgacgaattcatccgtacggaaacctgcaccacgtcattcccacgaacctacattccgtcattcccacgaaagtgggaatccagtgcgttgagtttcagtcatttccaataaattgccttagtattgaatgtctggattcccgcctgcgcgggaatgacgaattcatccgtacggaaacctgcatcccgtcattcccacgaaagtgggaatccagttttttgagtttcagtcattcccgataaattgccttagcattgaatgtctagattcccgcctgcgcgggaatgacggcggaaatcttgtttatattgaatcaaaaaaaacctgcaccttaatcagttggcggtttagtccgacttttggggtgcagatcaagctttcagacggtatttcctttaaaacttcatttcgagcgcgagactgaagttcctgcccggtgcggcataccttccatagttgctgtcgccgccgtgccggtttgccgtgctttccgcagtctggcgcaaggattcccaagtaacgtagcggtagttgccgatattgtagatagccgccctcaaggtcagccgttttttcagattcagataggcggaaacgtctgccgtcgaccaagaagacgacgctctttttgtcgaatatcgtttttgatcgcctgccagataagcaagctcgtcagggtttttccctttggaataggtcagcataatgtttgcgccccatttcccctcaggctggtcgtatccgaaccccaaaacataacgcgacggctgtaccgcatccaaagcatagctgcggagggacagtcccggccggttggataccgatttcggtttgatgcggttgtacgccaatgtggtgtacaaaccttcgggcagtttgccatacacgccgttccagtcgatttttcccaatatattaacgccttgaagcgacatattttgggcattgtaataatcgcgtatatcaatctctgtcaattgtcctgcctgattcggcaatttggttttgtgatcggcaacggcaatcatatcggtataacggttgcggaagctgctgatttccaaaaagccgaaatcgcccttccactgcaaaccgatttcccggttggctgccttttccgatttcagggcgggacgctgccagcctttcggataatcgtgataaatgtctatcccgaaaagttcttggaatgagggcgttctgaagccgctggaggcacggtaagacacggaaaaatgccggttcggtttgaacaagatgccgctgttccacgaacggtcaacataccgcccgctgcggacgagttcttccgacgtggtgaagtttttccggtcgtacctgccgcccaagctgaaatcgaaatatttgccgattgaaaaacggtcgttcaaagaaatatggatattgctgccgttgatttttcttggcacgcatttgcgggaacgcagggtttcgatgtagccgcagaccgacccttcgacgacttcgggcttacccaaaagatacttatcttgattgttttcatcgaatcccgtggattccgaaatccttgccgcattgtgggaaagctgttcggggcgggaaatcgctttggaagcatcgtaaccgaagcccaaagtcagatggtgtttcgtccatttgtttttcagcgatttctcaaacgaggcattcaaaacattgtgctgttcgcggtagtggaaacggtcgctgctgtcgtaggaatacggtttgtccgccgacgcgcggcaggatttgtccacagcaggatacacggcgcaattcagcttcagcgtgttgttatcggttgccacgccctgtttgtcaaacgacaacaccgccttatccgcccaattgtcagaatacgcttcgttttcataacgatacagcaaacccatacggcggcggcggtgatgttcgtcaataaatttggtgcgggaatatttcaaacctatgcccctgaccaaatttttatcgcccttccactcttctatattcggcacaaaatacaagccgtcgcggaaatcgtcgccgtcgtacaccccgctcttgtctctaaacttttccgcctcgtccgtaccgtaatactgtttttccgtcatatcgcggatatcgtaacgctgtttggtatcctcaaacacgccgccgacataatgcctgccgccgaagcggtagcccagcttggcaagccaagagccgctgcggtaatccatcggatcgggcaatatcctgccgccgcccgtgtaagcttgggcggacagattttcgtggcgcgcctgcgcctcccgcacctgcgcctcttcttcagcacttaaaggctgattttgttcaatacgttcttttacccagcggttgagctggttgttcaaatatttcccgtagcccgccaattttgccacgggcttggattcacgctcgccctctactgagaaaaatggctctcttgtcttgcgtttaatatcgtatgtctgacggaacgcgtccaaacggtctatgccgtattccaccccgtccgcaatatcgccgtgcgggcgcgtttcccgcccttggcgttcggttcggattaacagcccttcccaaccgtctttgctgaaccccgcgccgagcgacttcataaattggcggtttttactgccgtaggcggtttttgcctgtatcccccaacttttgccgtctgaaatcaggtctgccgcctctttggtgcggaaggcgaccgcgccgccgagtgcgccgctgccgtgatcggacgaaccggcacctttgtcgatttccaccgtgctgatgttttcatattcgatttcgttgattgcaccgctgccgccgcgtccgccgtatccgctcaacgatccctgcacggtaaacgcctgtatttgggcaacaccgtcgaccgaaaccgccacacggtttttatccacgccgcgtatcgagtagccgccgctcgcgccgttgccctgttcgacaaccgccacgcccggatcgtagcgcgtcaggtcgcggataccgagtacctgttctttgttcaacgtttccgacgttttgacgattttgcccaaaccggtcgcctctttcgatcgccgtcccactttggcggcacggacggtaatctctttcagggattgggtctgcgcggcatcaggtgtcgccccccccgcttgggcagcataagccggaaaagcggttgcaatggccaaggcagtcagagtcagcggaaaaccgtgtttcttattcatttttccacctcctgcatatctttcttcgcaccgaataccacgccgaattggtgtttaacttcagattctaactgtttgccaacatcaacttcagcatcaacttcagcttcaacatcaactttattttcagtaccttcagttataccaagagatttcccatcattattgaaaataataccgcccaattcctccgcctgcgggccgtaaaatcccccttctacacgaagattactagcttggaaggttttggggtcggtcgaaccatttcccgaaagattgatgccgttctcccgagtgcgtgctgtcgcgtagaaaccgttgccctcaatcttgccgttttcaatatggaaagcaggttctacaccgttttcctccgtcagcgttccggaaatcgatttcttgccgaaatcaacggtaaatactgcttttgccgcttctttatccgcctgattgtcccattgaatgggtttgccgatacgcgcttcccaagtgccggtatagtgtgcttctccagttttcggaatatccgtttccgccgtgcggatacctttcaggaaaaggtcgatgttcctgcctttaggggcttccggagcgggcaggatgccgtctgaaccgctgccgccttcttctgtcggcgattcttcttcgggttcttcagcttcatcttcaccttctacggcttcgtcttcttcgctgccttcgtcttttacggctgcgtcttcggtgccttcttcatcgtcgatttcgtcttcgccttcttcgacgctatcaacgcctgtatcctcttcgtccctctcttcgtcctgcgccttcggtttggcggcgggacgttcggtttgcatccgtccgattttcacataggtcagaaaatcgcagcaggttcggattgtcgttttcctaccatcggcaagctcgatggtttgttctttgtttaccaaaggaatttcacgcccttcgacaagaagtttgtcgggatgaccaaaatcgggcatagaggaaatggcaaactcacggggatttttatcacttgcctcgtcaacggaaattttcagagaatccaagattttggtgtgttttccagacgacagggcaggttttgtatctgctgcgttttctgtctctgttttttgtttgcctgcgaatacgccgaatacgctgttgtcgttgctgataaaccgtccggcaagctcttctccgttatcgccgaaaaaaccgccctcaagccgctgatcggcatcggtatggaaaaacaaatattctttatcagcgtgttgcgtcttcacctcggtgctaactttggcactgccggtaaagcggttgccgtccaatgttgcggtaatgtcgtaaatggtcagcggttttttgggctcatttggattacttttattttgcacatactgatttttaatcagcttgccattcagggttttgttatcaaaatcaaccgtatattcggcaggatgcttttccctgtcgtcggcatccctagcctcataagaagttgccccaatttcattaccataatatgtggtataacccaaatccgtactggaaaccgccttacctgtccgatgacgtttggcatcggtcatatattgccagttaccggaatattgcaccgttcccgcgctcggtaaagattgggaaggacgttctccggaataatatacaaaaccgtcataactaaatcggttaacaaactccttaccatcagaagtcttttctttttcattatcctttccttccgccctggtaaacacatagcccgcacggacaaattgatattgatatttttcttcttcttttttcgatgtgataaccctcacatcagaataccgttcgttgattttctttttaagtttgtcagcctgttctttcagcgtaccgtctaaaaacaggatatccttctctttaagcggcagatgctcctctgcctgatgcttgtcgggaatttccgtaccgtcttgtttataggaagcaatattccgccttggcagccgcattgccgcaccgacggcgggccggttgaccggcgtggtttctaccgaagacccggcagggggcggagtgggaacgtccttagatttgaaggtgacggggtacgcggtcggcgttgattcgacaacaggctgcacgccgaaattgccgccgatacaagatgctaaaagtaagggcaacaagacaatgccgccataattcggtttacacatccctacttttcctctatttgattaataataattatcattatattaatatgtacagataatatcaagccgtttttatagtgaattaacaaaaatcaggacaaggcgacgagccgcagacagtacagatacattccgtcattcccacgaacctacatcccgtcattcccacgaacctgcaccacgtcattcccacgaaagtgggaatccagttcgttcggtttcgcttgttttaagtttcgggtaacttctacttcgtcattcccacgaacctgcatcccgtcattcccacgaaagtgggaatccaggacgcaaaatctcaagaaaccgttttacctgataagtttccgcactgacagacctagattcccgcctgcgcgggaatgacgggatttgagattgcggcatttatcgggagcaacagaagccgctctgccgtcattcccacgaaagtgggaatccagttcgttcggtttcgcttgttttaagtttcgggtaacttccacttcgtcattcccacgaaagtgggaatccagttttttgagtttcagtcatttccgataaattgccttagcattgaatgtctagattcccgcctgcgcgggaatgacggattttaggttgggggcatttattgggaaaagcagaaaccgctccgccgtcattcccacgaaagtgggaatccagttcgttcggtttcgcttgttttaagtttcgggtaacttccacttcgtcattcccgcgaacctacattccgtcattcccacgaaagtgggaatccagttcgttcggtttcgcttgttttaagtttcgggtaacttccacttcgtcattcccacgaacctgcatcccgtcattcccactaaagtgggaatccaggacgcaaaatctcaagaaaccgttttacctgataagtttccgcactgacagacctagattcccgccttatatgatgcgctctatcaaaggggcgcattaattttcttaacattcccctttgacagccaagtgaaaggggcttttttatgtcagcagtaaatgtaatattttcctgttcttattggagaatatttaaaaaatcagattcttgtgttttgtgtttttatcagttcagacatggcgaaccgcataaactcattaatcaagagaatttttcaaagctttatcaggcgttcgattatatagattcggttggttcgaattttccagtgattatcacaacggatggttgtggtcttttttgttgatctttaaaagtttgtcaggatttggctttcggtcgttgaccgtcgtacgcgctttagcgcggaagacgggaaacggctgaaagccccccccttgactaacagggggggagcgaaattaaaaaccaattccaagagtagtgaacgaatgagtgaagttgaatatttctcacactttatatcggacggaaaagggaagcttttagaaattccgcagcgaagaggtaagcaagacggggtttttgttgattggatttcattcacattccatgaagatactttactgaaagtttccggttgccctttattttctgatgctgaatacatgtatgtattaagcagaaagctggaagaaattctaggttttggcataacgcgcaaatgcaaatcaaggggcaacaaattctatgaatccatgtataggttaggttcggatgatgttgattatggagaggtgcatttcggaggtcagcgcaatactgttttagttgagttgaaaggtactggttgcagcgttgcaagtccgggttgggagttgaggctaaagcagtttctcgatgattcgataaggacaagaataacgcgaattgacctagcacttgatttttttgatggagagtacacgccggatcaggcgttgttagatcacgataatggtttttttgataacagcaatcaaaggccgaaatctgaaacgatcggtacggcttggcggaatgaggacgggagcggcaagacattttatgtaggtcgcaagaaaaattctcgttttgttcgtgtttatgagaaaggcaggcagcttggagataaagaaagcaaatgggtaaggttcgagatccagtttaattatggagatatagaaatacccttggatattttaataaatcagggttcgtatttctgtggagcttttccaatttgtagaaaatttaaaaatatgccggttcccgaaaggtttgatcagagaaagaaaaagcttaatttaactttcgagcataaattgcattacgcgaaaaacgcggttggaaaactggtcaatttcatgattgaaatgggttttgataatagcgaaattgtggaatctttaaaggcagattcgggatttcccaaaggattagaacctgaaaaatatgctctggaaatgttaagggacggtttgaaacacggttttattcatgaacagccggatattgatttggaaattgaacttgatgaattgggggttattgcttttaaaaattctgacaaattcgatagggaaaaaaggctttttagtcctgattatgatgtcgagaaagaaaggaaatatcaggaatatttaagtaaagtttatcatcaaaatgtagattatgattatttttaaaggaaatcaaaatgtttaatcaaactcaaactgtaacttatcctgcaacttttttgggagccaaaaaattcaaaggcgaaattgatggctctaatatcgacacttgttccgtattggttgcaacacctttgccggcacagtcgggaaatgctgttggattcacggcagcacaaatgaagttcggggacagtaagaatttctcaaaattagagaatctcaaatacccgtgcgaagttatggtaacggttgaaatgacttcgacaggtaagggcatggttccttcattaattgattttcaggtggcagaaaagccgaaaggttgatttatgaaatttgaagaacgtttcatagttcaagacttggaaacgcatgactttatttatcccgatcctttcggtgatgtggggtttactcaaaatattaaatcagcaggtcaatttgaaagctacgaagatgcgttgaattcaggcataaatgaaataggcggaggattccagatatttcagttcttcgtaaaatcggaataaaagaaaaacaggctcggcgggcggtctgtcaacctttcacaaagcccgcaacaaaggaaaaatatcatgaaaatgaaccttgcaacactaattatcggctgggtggtctgtatgtttctttttcttttcgcaatcctctattttatcggctaaaaacgagattcggaaaagacttcgtccggatgaagcaagtcaagaagtcgtcttattttaaatatcaaaaaaggaaaaaaacgatgaacatcgttaaaaaatacgctgtaaaagcagccttggcagccggtatcttcacaccggccattgttatggcagatacctttgatccatccgcgattggtacgcaagtagcgaatgtaatcatgggtttcgtgtcaatggtttccgccgtgggtatggcggccattaccgtgattcttgcaatccaaggcttcaaaatggcttggagcatgattaaatctgtcaaataaacagagtgaagaaaaaggggcgtataaatgggctatcgtgtcggcataaattgttttgatacaagattgcaggcagacgactatttattgtcgtcccttcctcctactgttacccaggacggaaaaatcatcaggccggaaagggtgggcgataaatggattttgaacggaaagccggttacgttgtcttatccggaatgttccaattttgagcagataaagcaaggttcttatgtcggttcgacggttctaattctgtttgtagtcatttacggtttcaggcttctgattaattttttaaaagacataggcaaggttgggactgattgatgattatagatttctggtttcttctcggtttcttcttggctttgtctgttgcttggctgttttggtaacggttggtagaatcggctttttagagtgttttaaaaggtccgaattatgtttatttctgaatatcatttagttaaatttcaaactgattcacatatttatagagatttaccacaagcgttaatttattatagggaattgattagaaaaggggtttttaaaacttcgttttcatttgatatttttaggaatttctttcatcgttatgatagagattttatagaaattcaattccctgattcttctacattattaattaaattagatgaagcaaaatgttatgtttattatcctagggcgaaattttttaaagattatcctatgctttagtttttttgtatctaaatttgcattggcatcagtaaatgctccgggtaaatttgatagggttgaagtttatgatgatggcagatatttaggtattcgaggttcagatgacaaaagaagaagaatttggaaaggtgtatttgatagagaatcgggaagatatttaacttcagaagctcaagatttaaaagttaggcatgtatctactggagcatcaagtacgggtaaagttagttcggttgtatcttcatcagtttcccgcgctggcgtattggcgggggtcggcaaacttgcccgcttaggcgcgaaattaagcacaagggcagttccttatgtcggaacagcccttttagcccatgacgtatacgaaactttcaaagaagacatacaggcacaaggctaccaatacgaccccgaaaccgacaaatttgtaaaaggctacgaatatagtaattgcctttggtacgaagacaaaagacgtattaatagaacctatggctgctacggcgttgacagttcgattatgcgccttatgtccgatgacagcagattccccgaagtcaaagaattgatggaaagccaaatgtataggctggcacgtccgttttggaattggcataaagaagaactgaataaattaagttctttggattggaataattttgttttaaatagttgcacatttgattggaacggcggagattgtgtggtcaataaaggtgatgatttcagaaatggggctgatttttcccttattcgcaattcaaaatacaaagaagaaatggatgccaaaaagctggaagagattttatcgttgaaagtcgatgccaatcccgacaaatacataaaggcaaccggttatcccggttattccgaaaaagtagaagtcgcacccggaacaaaagtgaatatgggtcccgtcacggacaggaacgggaatcccgttcaggttgtcgcaacattcggcagggattcgcaaggcaacaccacggtggatgttcaagtaatcccgcgtcccgacttgacccccggaagcgcggaagcaccgaacgcacagccgctgcccgaagtatcgcccgccgaaaaccccgcaaacaacccgaaccccaatgagaaccccggcacgagccccaatcccgaacccgaccccgatttgaatcccgatgcaaatcccgatacggacggacagcccggcacaagacccgattcccccgccgttccgggacgcacaaacggcagggacggcaaagacggaaaggacggcaaagatggcggccttttgtgcaaattcttccccgacattctcgcttgcgacaggctgcccgagtccaatccggcagaagatttaaatctgccgtctgaaaccgtcaatgtagagtttcagaaatcaggaatctttcaagattccgcacagtgtcccgcacctgtcactttcacagtgactgtgcttgattcaagcaggcagttcgcgttcagctttgagaacgcatgtaccatagccgaacggctaaggtacatgcttctcgcccttgcttgggcggttgccgcctttttttgtatccgcacagtatctcgtgaagtctagcaggcgcagcaccgccgggcttcagtaacttgtaccaaggcagggggaggacgtccagaaagatttgtaaagacggctttatcgtctttataaatctttttggataccccttgccgccccgccaaaagaacacattctgccgcaagggcaggtggtaaggcgcgcgccttttgcgccgttccccctgcccccgcggcgtcgcaagtgagactgggggtgcgggggctagtccccgcaaagcctttcagcttcggaagccacggccgaaaggcaggcgcagcactgccggtctgagcggaagccaggctacaggcaggcgcagcaccgccgagctaggcggaagccaggctacaggcaggcgaagcaccgccggttgggcggaagccacggccgaaaggcagggcgaagcaccgccaggcttaggcggaagccacggccgaaaggcaggcgaagtaccgccggtctgggcggaagccatggtaaaaggcaggcgaagcaccgccgggcttcagtaacctttgttcaggcagggggaggatgtccgtaaagaatcgtaaaggcggggttttttcgcctttatgattctttttggataccccttgccgccccgccaaaagaacacattctgccgcaagggcaggtggtaaggcgcgcgccttttgcgccgtccccatgcccccgcggcgtcgcaagtgagactagggggtgtgggggactagtcccccgcaaagcgttcagcttcggaaactttggccgaaaggcaggcgaagcagcgcactttgcgacgaatgtcgcaaatagccgagaagcgcggggggattggcgataagcgcgaggggggtgtccccacagcgccgccgcgccgcgaatgcggcgcaaaatctttcagattaagaaacatttgtttaatgaggcaaccgtgccttttaagaaagggatagcaaatgaaattgttggccgcattgattccgcttttgatgagcgtggcaggccgtatattgactgcattaggcttgatggcggtaacctattcaggggtggatagattggtagcccattttcagcaggcgataaccaatagcataacgggcgcgcctcaagcgatgttgcagcttttttatataagcggcggtggaaccgttcttaatatcctgtttggcgcgatcgcctttattctgtcattcaaacaaatgacaaaactagcaacctcaatcgggaagaaaaaataaatggcagagatctgtttgataaccggcacgcccggttcagggaaaacattaaaaatggtttccatgatggcgaatgatgaaatgtttaagcctgatgaaaacggcatacgccgtaaagtatttacgaacataaaaggcttgaaaataccgcacacctacatagaaacggacgcaaaaaagctgccgaaatcgacagatgagcagctttcggcgcatgatatgtacgaatggataaagaagcccgaaaatatcgggtctattgtcattgtagatgaagctcaagacgtatggccggcacgctcggcaggttcaaaaatccctgaaaatgtccaatggctgaatacgcacagacatcagggcattgatatatttgttttgactcaaggtcctaagcttctagatcaaaatcttagaacgcttgtacggaaacattaccacatcgcttcaaacaagatgggtatgcgtacgcttttagaatggaaaatatgcgcggacgatcccgtaaaaatggcatcaagcgcattctccagtatctatacactggataaaaaagtttatgacttgtacgaatcagcggaagttcataccgtaaataaggtcaagcggtcaaagtggttttacactctgccagtaatagtattgctgattcccgtgtttgtcggcctgtcctataaaatgttgagcagttacggaaaaaaacaggaagaacccgcagcacaagaatcggcggcaacagaacagcaggcagtacttccggataaaacagaaggcgagccggtaaataacggcaaccttaccgcagatatgtttgttccgacattgtccgaaaaacccgaaagcaagccgatttataacggtgtaaggcaggtaagaacctttgaatatatagcaggctgtatagaaggcggaagaaccggatgcgcctgctattcgcatcaagggacggcattgaaagaagtgacggagttgatgtgcaaggactatgtaaaaaacggcttgccgtttaacccatacaaagaagaaagccaagggcaggaagttcagcaaagcgcgcagcaacattcggacagggcgcaagttgccacattgggcggaaaaccgtagcagaacctaatgtacgataattgggaagaacgcgggaaaccgtttgaaggaatcggcgggggcgtggtcggatcggcaaactgaagaaaacggcaagagagaaaaaagacccgtaaaccgtttgaatatagacggtttacgggtctttgtttcgcgcaaagcaagggctaaggcagtcaggcagcaaatcccgcaatgtattaaaacagacgcgtagaaatgccggctgcctttatccatcctcgaaattgaatatcatcctagccgtatcaaggctgtataaataaggaaaataccaatgaatataatcgggctggacatctcaaaggacaccatagacgcaacattgcataaaacaaacggaagtatccattacattaaatttaagaataatgatgatggattaaaacagtttagattgtggataaagggaaacagaatcagaaaagtctatatcggcatggaggcaacaggcatctattacgaaaaggcagcagatatgctttcttcctactatactgtttacgttattaatcccttaaaaatcaaggactacggaaaaagcaggtttaaccgtaccaaaaccgacaaagcagattcaaacctgatagcagactacataaaaaggcatcaagatacattgataccgtatcagatacccaaaaacaaagcactgcaaaaactgattaaccttaaaaatcaattacatcaacatcagaagcaaattaaaaaccgtcttcatagcactgaagaagacttcataaggaacatacatcaagacttgatagataccatacaggacaagatggaacaggtaaaaatagccatatccgaacaaatcaaaaaacaaacggacaataaccattaccgcaatcttcaaaccatcccgagcataggcaaagacaccgcatcagttctttatgcgcaactgacagaaaaacattttaaaaccgcaaaccagtttgtatcctatgccggattaaatcccgccatcatacaatcagggacaagcgtaagaggtcggggcagattgagccgatacggaaacagacgattaaaaagtacgctgtatatgcccgccctttgtgcttaccgttttaacgcatttccgaaattaataaataatctgaaaaaagcgggtaagccaaagatggtaatcatcgttgccatcatgcgcaaactggcgaagctcgcctattacattgttaaaaccggccagccttacgatgcggaaagacaccgattgaatcaataaaattcaacaaaattaaacggttacgcgaatatatttgtgtaaccgtgcatttgcatatcgtaaataaacgtaaataaaaataacaatataaatcagtatattgcaactttgttttttattttgtgttgacgggcaacatatcatctgcgcgggaatgacgggatttgagattgcggcatttatcgggagcaacagaagccgctccgccgtcattcccacgaaagtgggaatctagttcgttcggtttcgcttgttttaagtttcgggtaacttccacttcgtcattcccacgaaagtgggaatccagttttttgagtttcagtcattcccgataaattgtcttagcattgaatgtctagattcccgcctgcgcgggaatgacgaatccatccatacggaaacctgcatcccgtcattcccacgaacctacattccgtcattcccacgaaagtgggaatccagttttttgagtttcagtcattcccgataaattgccttagcattgaatgtctagattcccgcctgcgcgggaatgacgggattttaagttggggtcatttattggaaaaagcagaaaccgctccgccgtcattcccacgaaagtgggaatccagttttttgagtttcagtcatttccgataaattgccttagcattgaatgtctagattcccgcctgagcgggaatgacgaatccatccgtacggaaacctgcaccacgtcattcccacgaacctgcatcccgtcattcccacgaaagcgggaatccagttcgttcggtttcgcttgttttaagtttcgggtaacttctacttcgtcattcccgcgcaggcgggaatccagtgcgttgagtttcagctatttagaataaattttgaaactctaatcgcgtcattcccacgaaagtgggaatccagttttttgagtttcagtcatttccgataaattgccttagcattgaatgtctagattcccgcctgcgcgggaatgacgaatccatccatacggaaacctgcaccacgtcattcccacgaaagtgggaatctagttcgttcggtttcgcttgttttaagtttcgggtaacttccacttcgtcattcccacgaaagtgggaatccagttttttgagtttcagtcattcccgataaattgtcttagcattgaatgtctagattcccgcctgcgcgggaatgacgaatccatccatacggaaacctgcatcccgtcattcccacgaaagtgggaatccagctttttgagtttcagtcatttccgataaattgccttagcattgaatgtctagattcccgcctgcgcgggaatgacggattttaggttgggggcatttattgggaaaagcagaaaccgctccgccgtcattcccacgaaagtgggaatccagttcgttcggtttcgcttgttttaagtttcgggtaacttccacttcgtcattcccgcgcaggcgggaatccagtgcgttgagtttcagctatttagaataaattttgaaactctaatcgcgtcattcccacgaaagtgggaatccagctttttgagtttcagtcattcccgataaattgccttagcattgaatgtctagattcccgcctgcgcgggaatgacgaatccatccatacggaaacctgcaccacgtcattcccacgaacctgcatcccgtcattcccacgaaagtgggaatctagttcgttcggtttcgcttgttttaagtttcgggtaacttccacttcgtcattcccgcgcaggcgggaatccagtttcttgagtttcagtcatttccgataaattgccttagcattgaatgtctagattcccgcctgcgcgggaatccagtgcgttgagtttcagctatttagaataaattttgaaactctaatcgcgtcattcccacgaaagtgggaatccagttttttgagtttcagtcattcccgataaattgccttagcattgaatgtctagattcccgcctgcgcgggaatgacggcggagcggtttctgttttttccggtaaatacccacaagctaaaatcccgttattttcacaaaaacagaaaaccaaaaacagaaacctgaaattcgtcattcccacgaacctacatcccgtcattcccacgaaagtgggaatccagttttttgagtttcagtcatttccgataaattgcctcagcattgaatgtctggattcccgcctgcgcgggaatgacggcggagcggtttctattttttccggtaaatacccacaagctaaaatcctgttattttcacaaaaacagaaaaccaaaaacagaaacctgaaattcgtcattcccgcgcaggcgggaatctggttcgttcggtttcgcttgttttaagtttcgggtaacttccacttcgtcattcccgcgcaggcgggaatccagtgcgttgagtttcagctatttagaataaattttgaaactctaatcccgtcattcccacgaaagtgggaatccagttttttgagtttcagtcattcccgataaattgccttagcattgaatgtctagattcccgcctgcgcgggaatgacggctgcagatgcccgactgtctttatagtggattaacaaaaatcaggacaaggcgacgaagccgcagacagtacaaatagtacggaaccgattcacttggtgcttcagcaccttagagaatcgttctctttgagctaaggcgaggcaacgccgtactggtttttgttaatccactatactgtaatcagggatgctcagttcgtcgaaacggcaaaacaggttgaagtcgatgcgggtgatgaggctgtgttcgagttcgggatcggagaggctgtgccattgtccgagcaggacggctttgaacatggacagcaggggataggcaggacggccgcggtggtctctaaggtaacgggttttttgacggttcaggtattgttcgatcagctgccaatcaatcacccggtccaacttcaatagcgggaagcggtcgatgtgtttggcaatcatggcttgggcggtttgctggaagaaggtgctcatgagaaatctcctaaatgtcttggtgggaatttaggggattttggggaattttgcaaaggtctcaacttgagtttcacgccccgcttaacaatattcagttggtaaatattagataaaaccataaaaattaaattgatggcttttataatccccgatttgcgaaaatgccgtctgaaagtcttcattcaggctttcagacggcattttgatcatcaagtaacgctttatcaggcttttttattgttcaacgcagctttgacaaacgcggtgaacaaaggatgccctttgcgcggattggaggtaaactcggggtggaactggcaggcgaagaaccaaggatggttcggcagttcgatggtttcgaccaagcgttcgcgtccggcagatacaccgccgatgaccaaacctgcctgttccagtgtaggaacgtagttgttgttgacttcgtagcggtggcggtggcgttcgcggatatgtccgctgccgtagattttggcggcgaggctgcctgctttcaattcgacttcttgcgcgcccaaacgcatcgtgccgcccaaatcggtggattcgtcgcgggtttcgacgctgccgtcggcagtttgccattcgtcaatcagggcaacgactggcgcggcgcatttgaggtcgaactcggtggaattcgcgcctttcaagcctgccacgtcgcgggcgtattcgatcagcgcaatctgcataccgaggcagatgcccaagtatggcacgttgttttcgcgggcgtagcgcacggcggcgattttgccttccacaccgcgcgaaccgaaaccgccgggaacgaggatggcgtccatgtctttaagcatggaaacgtcgcccttgtttttctcgatgttttcgctgtcgacaaaggtaatctgcacgtcggtttcggtgtgaatgcctgcgtgtttcaaggcttcgatcagcgatttgtaggactcggtcaaatcgacgtatttgccgaccatggcgattttgacggtgtgtttcgggttttggatggcgtggacgatttttttccacgcggtcaaatccgcctgctgcacattaagctgcaactgctcggtaatgatgttgtcgatgccttggtcgtgcagcatttcggggcattcgtagatgctgtccacatcgtagctgccgacaatcgcgcgttcttccacgttgcagaacaaggcgattttgcggcgttcgtccgcaggcattgtcctgtccatacggcaaatcaggatgtcgggttgcaaaccgatgctcaacatttctttaacggtgtgctgggtcggcttggttttgatttcgcctgcggcggcgatgtaggggacgtagctcaagtgggcaaacaaggtgttgttgcgccccaactggcttcgcatctggcggatggcttccaaaaacggcagcgattcgatgtcgccgaccgtgccgccaatttcgacaatcgccacatcgtaacctgccgcgccttcgtggatgcgtcgtttgatttcgtcggtaatgtgcggaatgacttgaaccgtaccgccgaggtagtcgccccgtcgttctttggcgataacgttttcgtacacctgtcccgtgctgaagctgttgcggcgggtcatcgtggaatcgataaagcgttcgtagtgtcccaagtcgaggtcggtttccgcgccgtcgtcggttacgaacacttcgccgtgttggaacgggctcatcgtgccgggatcgacgttgatataaggatcgagcttgagcatggtaacgttcaagccgcgcgattcgaggatggcggcaatagaagcggcggcgatacctttacccagtgaggagacaacgccgccggtgacgaaaatgaatttggtcataatgaaatacccgtattggaatgcgtgattttaacgtgaagcgcgcggttctggcaaacggacggatgccgtctgaacgatggacggctgttttcagacggcatcttttctttatttcccggtactttgccgcaactcgcggcgcaggattttgccgacgttggacttgggcaactcgtcgcggaattcgatatttttcggtactttatatgcggttaattcggtgcggcaaaaagcgataagttcttctttggtcaaagacgggtcttttttgacgacgaatactttgagtgcctcgccggttttttcgtcgggaacgccgatacaggcgacttccatgactttgccgtgatgcgcgatgacttcctcgatttcgttcggataaacattgaatccggaaacaacgacgaggtctttcttacgatcgaccagcttcaaccagcctttttcgtccatgacggcaatatcgccggtttccaagaagccgcgcgcgtctatggctttggcggtttcttcggggcggttccagtagccttgcatcacttgagggccttttacccacaattcgcccggctgcccgacggggacttctttgccgtttgcgtcgcgcagttcgacttcggtggacgagacgggcaaaccgatgctgccgctgtatgattcgatgtttaaggggttgcagcacacgccggggctggcttcggtcagaccgtaggcttcgacgatgggcgtgccggtgatttttttccatttttcggcaacggctttttgggtcgccataccgccgcccaaagtcagccgcaattctgaaaaatcgacttcggcaaaatcaggacggttaaccatcgcgttaaacagcgtgttcacgccgataaatacattaacccgctgttttttcagttctccgataaagcctttcatatcgcgcgggttggtaatcaggatgattttcgagccggcattggcaaaaatcatcagattcacggttaaggcaaaaatatggtacagcggcaaggcggcgataacggtttctttgccctcgcgcaactggtttttaatccattcttttgcctgaagcatattggcgcagatgttgccgtgactcagcaccgcccctttggcaacacctgtcgtgccgcccgtgtattgcaacagcgcggtatcttcgcggtttaatgcgacaggttggaaaacgtgcttcgccccttctttcaatgccgtctgaaaggaaacggtttcccgaatacggtattcgggcaccattttcttgattttccggatgacgaaattgatcagcgaacctttaagcagcccgaacatttcgccgacggaggctacgatgacgtgtttgatctgcgtgcgcggcagcaccagctccagcgtgttggcgaaattttccaaaacgatgatggcggtcgcgccgctgtctttcaactgatgctccagctcgcgcggggtatagagcggattggtgttcaccgctaccaaacctgcctgcaaaatgccgaaaagggcaaccggatattgcagtacattgggcaacattattgccacgcgctctcctcgaggcaatttaaggacgttttgcagataagaagcaaaatctgttgccagtttgccggtttcggcataagtcagcgtcttacccatgttttgaaaagcaggttggtcggcaaatttttccacgctttggcggaatacgtcgctgacggaattgtattgcgtgatgtcgatttcggcactgacgcccttctcgtagctgtctaaccagattttttccataggtatcggtctttaaagtggaattgagcggaacaatgccgtctgaaaaccgtttcagacggcattacctttatcgtgtgatgatgacgggtttgtcggtcgtttggatgataccgccgcccaaacagatatcgccgtcgtacagcacggcggactgacccggcgtaaccgcccattgcggttcgtcaaacaccagctcggcggtttcatcatccaaatagcgcaactcacaaggcgcgtccgccatacggtaacgcgttttgcaggtatagcgtcctgccttcgggcgttcgggcagcgtgaaactcaaatcgttcatcacaaggctgcgggtataaagcagcggatggtcgtgtccttgcacgacaatcagttcgtttttcgtcaaatctttagccgcaacaaaccacggttcgcccgcgccgccaatgcccaaacctttgcgctgtccgagcgtgtagaacatcagcccgacgtgttcgccgacggttttcccttcgggcgtaaccattttaccattgtcggtcggcaggtatttctgcagaaactcgcgaaacgggcgttcgccgatgaaacagatgcccgtgctgtcttttttagcggcggtcggcagtttgaactcggcggcaaggcggcgcacttcgggtttttccaaaccgcccaacggaaaaatcgcgcgctcgagttggaaaggcttgaggcggtagaggaaatagctttggtctttgtttcgatccaaacctttgagcaggtaatgcacgccgttgcgaacttctttgcgcgcatagtggccggtggcgatggtatccgcgccctgccctacggcgtagtccaaaaagcatttgaatttgatttcggcgttgcacaacacatccggattcggcgtgcgccccgcactgtattcctgaagaaaataagcaaagactttgtctttatattgcgcggcgaaattaacgatgtcgatatcgatgccgataatatcggcaacggcgatggcatcgaacgaatcctgtttgatgctgcaatattcgtcgttgtcgtcgtcttcccagttctgcatgaacacaccgcgcacttgataaccctgctgcttgagcagggcggcggttacggaagaatcgacaccgccggagagcccgacgatgatattggaagggtttgctgtcgtattcatgcgtagaatatggttggaaacggcggtttttaaaggcggattttaacacattttaaaggcgggcataaaaatgccgtctgaaagcccgggctttttcagacggcatttcaaacattttcagcagattagtgctgatgcgcttcgccgtggtgatgaccgtggttcattgccggcatcggcgcgattttgacttccagttggacggtttgcgctttggcgtttttaaatttcagggtaacgggaattttatcgccctcttttaattgttttttcaaacccataaacatcacatgatagctgccgggtttgagttcggtaacggatttcgcttccaaaggcacgccgccttcgacttcgcgcatccgcatcacgccgttgtcgttgatgtgggtatgcacttcgacgcggtcggcaacggggctgcttccgccgagcaaaaagtcttgtttggcttcgtcgttgtggattttcatgaacgcgccgcctattttcataccttcgacggtggtgcgcgcccagccgtcctcaacgtggactccggcggcggaaaccgcgcctgccaaacctgccatcatcacggccgccaataattttttcatctttctgctccttataatatcagacggggaatgtgcttaatcttatagcggattaacaaaaaccagtacagcgttgcctcgccttagctcaaagagaacgattctctaaggtgctgaagcaccaagtggatcggttccgtactatttgtactgtctgcggcttcgtcgccttgtcctgatttttgttaatccactatacatacaaatactgcctggaaatttgatgtagattaagtgaataataaataccacatactaatcctaaaggattacaaatcctgctgcaagcgttttacccgaacagggcagacagccaaaccgccgccaacatcagcatcgcgaacaattgtgcggcagaacctgcgtctttggcgagtttggccagctcgtgtttttcggtcgaagtatgatcgacggcagcttcgacggcggtgttgaacagttcgacaatgaccgacacaaaagacgcgataatcaacggcaggcggacggcggtttcggaaacccaaaaaaatgccgcgcacaccagcagtacgttcagccacaaaacctgacggaatgccgcttcgtaacggtaggcggcggcgatgccgtctatcgaatagccgaatgcgttaatgacgcgcctgatgccgcctttgccttttttttctgccgcgtaggaggaaggttccatcggtatcctttcaaaatgttctcaatatagtggattaacaaaaacctgtacggcgttgccccgccttagctcaaagagaacgattctctaaggtgctgaagcaccgagtgaatcggttccgtactatttgtactgtctgcagcttcgccgccttgtcctgatttttgttaatccactatatataccgtctgaaaacggggcggcggggtgtccgtacggtattaagcgtatccctgccggctgagagaaaaccctgcctgcccaatcaaaccaggcggttgtgaagcaaaagcctttcagacggcatcggtttaacgtaccgaccacgcggcaacggcatcggcaaacattgccgccacatcgaaacctttttgtttcataatttcttggaatccggtcgggctggttacgttgacttcggtcaggttgctgccgataacgtccaaaccggccagcaggatgccgcgccgtttgagttcgggggcgagcgtttcggcaatttcgcggtcgcgtccgcccaattcctgcgccacgccgcgcccgcctgccgcaaggttgccgcgtgtttcgccgttttgcgggatacgcgccaaagcataggggacgacttcgccgccgataatcaggatgcgtttgtcaccgtgtacgatttcgggaatgtagcgttgcgccataatggtgcgggaatcaagctgcatcagggtttcgaggatgctgccgatgttggggtctttttcggtcaggcggaaaattcccataccgcccatgccgtcgagcggtttgatgatgatgtcgccgtgttctttcaaaaatgtgcggacatcggcggaacgggtcgttaccagcgtgggcgcgataaagcggctgaagttcaaaatcgccagtttttcattaaagtcgcgcatcgcctgtccgctgttaaagaccttcgcgccctgctgttccgccagcgtcagtaattgggtggcgtagaggtattgcatatcgaacggcggatcggtacgcataatcacggcatcaaatgcttccaatgccgtctgaactttgtcggcagatttgaaccacgcatgatcatcatcgttttttgcacccaaaaattcaaatgccgatgcctgcgccgttaccaaaccgccgtttacagacaattccccgctcaatgtgtgaaacagccgccagccgcgttttgccatttcgcgcatcatcgcgtaggtggtgtctttataggttttgaaacttgccatcgggtcggcgataaagaggactttcatcatatttcctttccggtgtgccgaatgtgccgcatttcgcgggtaaaggagaaattccgcccgaacaatattcagacggcagggatggggttttacttaggctgccaagagtctttcagcgttaccgtgcggttaaacaccggcgtgtctttgccgtggtctttacggtcggttacgaagtagccgatacgctcgaactgccaacggctttctgccggcaaatctttggcggcaggttcggcgtaggcggtgatttccttgacggattccggattgaggaaatcggtgaacggcaggtattcgccgtcttcgccgcgcacggcatcgggacgctcgacggtaaagaggcggtcgtacagacggactttgatttcggcggcgtgttcggcggaaacccaatgaatcacgcctttaactttacggccttctggatttttgcccaaggtgtcgtggtcgatgctgcatttgagttcaaccacattgcctgcttcgtctttgacgacttcatcgcacttgatgacatagccgtggcgcaagcgtacttcgccgccgggaatcaggcgtttgaagcctttgggcggattttcggcaaagtcgtcggcttcaatatagatggtttgggaaataggtacttcgcgctcgcccatttcctcgtggttcggatggaacgcggcacggcggctttgggttctgccggtttcaaagttggtcagggtcactttgagcgggttcaacaccgccatcaggcgtggggcggaattttccaactcttcgcgaatcgcgccttccaacacgctcatatcgacgatgttttcagatttggaaataccggcgcgtttggcaaacaggcgcagcccttcgggcgtgtagccgcgtcggcgcataccggaaatggtcggcatacgcggatcgtcccagccggaaacgtgtttttccacaaccaactgattcaatttccgtttggaggtaatggtgtacaaaagctccaaacgggaaaactcgtattggcgcggacgggtggcatgcggcgcaggaatgttgtccaacacacagtcgtacagcggacggtgtgcttcgaattcgagcgtacacaaggaatgcgtgatgccttcgatggcatcggagatgcaatgcgtgtagtcgtacatcgggtagatacaccatttgtcgccggtgttgtggtgatgggcgcggcggatgcggtagatgacggggtcgcgcatattgatgttgcccgatgccatgtcgattttcaggcgcagggttttgctgccgtcggggaactcgccgtttttcatgcgtgtgaacaggtcgaggttttcttcgacgctgcggtcgcggtaagggctgtttttacccgcttcggtcagcgtaccgcggtattcgcgcatttcttcgggcgtcaaatcatcgacatacgctttgccgtctttaatcaaaccgacggcgtagtcataaagctggtcgaaatagttggaagcgaaacgcggctcgcccgcccaatggaaaccgagccactcgacatcttctttgatggcgttgacgtattcgtcgttttctttttcggggttggtatcgtcaaaacgcaggttgcacaagccgtcgtaaatatacgccaaaccgaagttcaggcagatggatttggcgtgtccgatgtgcaggtagccgttgggttcgggcgggaaacgggtttggacagctgtatgtttgccgctttcgaggtcttcttcgatgatggtgcggataaaatggttgtccgcaaattggtctttattgagcatagttttctttgaacagatggcttcagacggcattggaatgattccgtatgccgtctgaagcggtttgggaatgtgtttattgtacccgacttgcgcgctttgacatagcgttcagacggcatcggcaatcaagcattccacccccgcctctttcagcatcttctgcatcgcggtatcgggcagccggtcggtaaatactttgtcaaacgccgtaatgtcgccgagcctgaccagcgcgttgctgcggaatttactgtggtccacgccgaggaagcggacgcgcgcattggcaatcatcgcctgcatcacgctgacttctttgtagtcgtcgtccaaaagcgaaccgtcgctttccacgccgtgcgtactcatcacggcataatcgactttgaactggttgataaaatcgacggttgccacgccggtaataccgccgtccaaagggcggacgactccggaagtgatgatgaccgtataatccgtccgcgccgaagcaatcgaggcggcgtggatattgttggtaatcaccctcaggctgccgcgccgcctgaccagctccgacaccacggcctccatcgtcgtgccgatactgacaaacagcgacgaaccgtcggggatgtgttccgcaatcagccgggcaatggcgtttttttcgttttgacaccgggtttggcggtcggcgggcaggccctccggcaagtttccgcccgaagatgcgccgccgtgatggcgtttcaggctgccgacctcctccaactcgcggatgtcgcggcgtatcgtctgcggggtaacgtccaatgcggcggcaagctcgtccaccgacataaactgatgccggcggacaaggcttaaaatctctccgtgcctttggattttcggcttcatcgttttctgcctccttgcatcgggatgccgattttaccgcgttcaacccaaagcggaaaacaccaccatcagaaacggggcggcgatattgaccaccacgccgaagctgaccgctaccggcacgacttccaaaccgcccgcaccctgaatcacgggcaatgtaaaatccatactggtcgcaccgccaacccccaccgccgcatctggaaaacgcttcatcagcagcgggataaatgccagtgcaaacagctctcgtgccaaatcgttcagcagcatgatgctgccccataccgcgccgtaagcctcggtcatgaccaaacccgagagggaataccaaccgaagccggaagccatcgccaaacctttcgtccacgacacaccgtctgtcgatgcggcaaacagcagcccgcccgaaagagatgaaagcataaaccagaccgacaaccgaatacccctgcggttgaccaaaacctgccgcaacgatacgccgctgcttttgagctgtacgccgatgaggaacaccagcagcatcagacaatacatgcccgcgctttcagacggcatccaaatatcgcgcatcagtttgccgaatgcaaatccgagcagcacgcatccgagctgccccacactgcccgacacgccgaccgaaacgcccttccctttcccctttatccgccacgggaataactttcccaacactgccaaagcaagcaggttcgccccgaccgtacaaacaaacagccacagaaccgtcaacgccatatcgtccaaccgcgaacccaaatcctccacgcgcgacaacgagacgccgatcagcagcagcacagcatacaccaagaccgatagcaccttatccaaagcgggcaggtaaggcttgggcacacggataaaaaatccggcaaacatcggtatcaataccgaaagcaacgtcatcaggctgtccatctactgctctcctttattgccgcatgatatgtgcggtttaaaaattgccgtctgaaaattgcagatacccgcatccatatttcagacggcatcaggttcgccattaaaaaaccgcctgaaggttcaggcggcttatccgctccggcattcaatcttccaaagtcttttccaaacgctccatacagttgcccaaatggcggcgcaggattttgaccacgcggttgcgcctgcccgccagcagcaggtcgaggatttcgcggtgttcggaatgcgtatgcgtattgatggcgtgtttttcctcgcgatgcacgcccgccacggcgacaatcagggaagaccgcgcgcacagcgtattcataatgtcgaacagcacatcgttgcccaccaggcgcgccagttcgacgtggaaggcattggacaggcggttccagccgacgcggtcgcccctgccggaggcctcttcttcgcgccgtatcatcgcataaagcggcttgaggcgcgtttccaaatccggcaaatctgcgaggatattcaaaatcatcgtctccatttcgatgcgcgcattgaacacatcctgcatttctttcaaatcgggaacgtggacgaacgcgcccctgttgggttgcaaatcgacaatcttgtcgtgcgccaaaagcgacagcgcgccgcggacggtgttgcgcgaacacaccatctgacggcaaagttcggattcggtcagctttttgccgggcagcagcacctgatcggtaatgccgtccaaaatcagggcgtaaacacggaacagctccgaatcgtgccgctcttcgagaatcagggaagacgtggtcggcgcatggataatgtcgtcgttttcaaagttcatgatgttttccgtatttttacgctttcaaattttttaagatgttttaaggcggctgtgtttcaaatcgtgtcagaggaattaaagcattgcacaaatttattttatagtggattaacaaaaatcaggacaaggcgacgaagccgcagacagtacaaatagtacggaaccgattcacttggtgcttcagcaccttagagaatcgttctctttgagccaaggcgaggcaacgccgtactggtttttgttaatccactataattcaataaattaatatatggcttaaaataacgggattctcgcctcccgcccgcccgcagaagcaggcggatatcattttaaaacgcggcatttaaaatttgaccgaaaattgttgacaatccggaatcaagtctgcacaataccccgacaagtccaagtattataaaggctgaataaagaggaaacagcaggcagatatattcgggaggtgcagtccgaatatatctgcttttttatgcgcctccggattgcctgccgcacctttcccttcagacggtatcagccgtttccccataatgccgcccgatgcctatttatctgccccggcaatttcaaaactgtgggtaatctttgccgctttgcccaacataatcgaagccgaacagtatttttcggcagacatctgaacggcgcgctcaatggccgattctttcaaatcatgcccgaatactttgaaatggatgtggatttcggtaaacacgcgcggcgcatcgtccgcccgtttcgccgtaaccgtcgcacggcagtcagtcactttctgacgctgtttttcggcaatcatcaccacatcgatgctcgaacagcccgccacgcccaacagcagcatttccaaagggctgggcccgcgcttagccttaccttctgccgccgacccctccataacgacgctgtgcccgccttccgtcgtgccgacaaaacacatcccgtctatccattttgatgtaacctgcatggtgtcattcctgaaaatagcgttaaaaccgctttgcatatggcgttattgtaaacaatttcaagcggcttatgcagaaatatggacaaaacggcaaaaaaacacttgaaaaccgatttacggtttggctgcctggccgttgatctgcaccgatttgagtttcagcgtataggttttgccgtcgtcggtatagccgatttgtgccggaatattgttcagggacggtgcgaagaaatacattaccgcatcgtcgccgcgccgcacccgatatttgacgacttcggtttccacgccgcctatgctgtattttcctgtacccgccttattcaaaccgccgacggaataaagttttttgccgttggtgattttcagccccggggggagtttcgcgtcatttgccgccaactgccaggcaagcgtgaacaaatccatagccttggggctttgctcggttttgctctcgcccgctttgccgtaagttacgctgccgtcggcgaatttggcttccgcatacagtttgcccctgcgtatgtctctatagtaggtagggtgcagggtattgccgacaaccgtaccgccggactcgaaacggatattgtatagcggcactttaatcgtcgaaacgattttgtaagcattgccgctgcgttcaaatgtcatcgtggcgggaatgccgtagctgccggaatagtgcagcacggcggattggggcagccctgccgcatacgcgcacggcagggcggcggacaaaatggcggcggaaaatatatttttaaaagtcttcatcatttgctcccgcccggtttacgccgtcagaaaacgggcggcatcggcgttttccgaatttctgacgcggtttccctcaataatcaggcggccggcggcaaaatcggcaacggctttcggataaagtttatgctcgacagccaaaacccgtgcggcaatatcgtctgccgtatcgccgtcgagtatcggcacaaccccttgcgatacaatcgggccgcaatccagttcggcagtaacgaaatggatggtgcagccggcaacgcggcagcccgcctccaaagcgcgttcgtgcgtatgaagtccggtaaacgagggaaggatggacgggtgaatgttcatcagcctgccttcgtaacgggcgcaaaactcgggggtcagaatccgcataaaacctgccaaaaccaccaagtcgggttgatatgcgtcgattttctccatcatggcggtatcgaaggcaagccgggatgtaaagtttttatgattcaggctatcggtcgggatgccgcgttcggccgcccattgcaaaccggcagccgtttcgctgttgctcaacacggcggcaatgcggacgttgtgaatggcggcattgacgattgcctgcatattgctgccgcgtccagaaatcaggatgacgatgtttttcataatggtgcgcttttgaaagggatgccgtctgaaccgctgtttggtggtttcagacggcatttgccgtaaaaatgcccgaaaacctgtttcgggcatggattcggacttaatttacttttttgatgtcgacttgagccggctgcttggcgggcgcgttttcgggtgcgccgattttgaccagtttcacatcaaataccaaagtggcgttcggaccgattttgtcgcccgcaccctgttcgcggtaggcaaggttggacgggatgtagaacgtggcttcgccgccttctttcagaagctgtacgccttcggtccaacccggaatcacttggctcaaagggaaggtgaccgggccgccgttggctttgctgctgtcgaataccgtaccgtcaatcaggcggccttcgtattccacggtaacgatgtcgtctttggtcggctgtttgccttcgccctgtttggtgattttgtattgcaggccggaagcagtggtcttcacgccgtctttggcggcattttctttcagaaaggcttcgcctttttctttattggccttcgcgtccgccttgtgtttttctacggctttagcctgttgttcctgaaggaatttcatcatgacttcctgagcctgctcttcggtcattttgatttctttgccgtcatacactgcctgcatggcttcggtaaagactttcaaatcgatttccgcgccctgttccttcatttgcttcagggagcgtccgatgtccacgcccatcgcatagcttgcctgctgcatcgtgctgccgatcgaagaggtgtcgccctgcgcggaagaagcggcggcaggttcggatgcagatgcgggggcggcttcttttttgccgcaggcggaaagtgccaaagcggcggaaagggtcagtgcgctgattttgaaaatggtgttcatgatggatcttcgctgtcgataaggtcggaaaaacgggattatagccgagtttgaatgtttcaacacacaggatgacacataaagcgtcaatcgtgtgttgccctgttttggaagggattgaaccttccaaaataagttttgattctaccgccccgagggacagatgtccaagtggcggggttcaaccgataaggaaattttaatcaaatagaatcaagcctgtttaaattttgtaaatgcggcatttcagacggcattttatgccttgccctccatgccgtgatgttcgatggcaaaaccgcttcggcggtaggcggtaaagcgttcgcgcgcgtcggcgagctcttccaagctgttgccgacgatttccaaaacgcgcgcgggcaagaccggagcggtgttccaaaaaccgtcggacaggttcaaaacggtcatgccttcgggaattcggggcagattgccgccgcaggcaagcaggacggatggttcagacggcatggcttcttccgtttcccaaatttcgtgcggaatgaaactctcggcctcgtattgccaaagcattttgtccaattcctgaagctgcccgaacgaatcggaccacaccagtatcctgccgccgtcccgaatcgcacgggcaatcaggcggcaggtgaaaatcggaacttgggcaacgtgcgtgtaaaaggtggctttcggcatattgtttgaacatttggcaggataatgccgtctgaaaggcttcagacggcattgtgggaaaattaaagattccgcagatagttcagcagcaagggaacgggacggccggtcgcacctttttccgcaccggatttccacgccgtacccgcgatgtcaaggtgtgcccatggatagtcttcggtaaagtaggataggaatgttgcggcggtaatcgtgcccgcgccgggcgtgccgatgtttggaatgtcggcaaagttggatttgagttggtctttgtaggtctcaaagagcggcagttgccatgctttgtcgtccacgttgtagaagcggcaagcaggctgtcgatcaaatcctgattgttgcccatcacgccgctgacatcgtgccccaaggcaacaatacacgcgccggtcagggtggcgacgtcgatgacggctttgggtttgaactgctcggcgtaagtgagcgcgtcgcacaaaatcagacggccttcggcatcggtgttcaacacttcgatggtcagccctttcatacttttcacgacatcgcccggtttgtttgccgcgccggaaggcatattttcacaagtggcgacgacggcaatcaggttaatcggcagttgcagtttgacggcggcgcagaaggtgctgatgacggttgccgctccgcacatatcaaacttcatttcgtccatgttcaggccgggcttgagggagatgccgccggtgtcgaaggtaatgcctttgccgaccaataccacaggcgcggcttctttgtcggctgcaccgaaatagctcagttcgaccaaatagggggcttccgcgctgcctttggcgaccgaccaaaacgaacccatgttttctttgatgtagtctttttcgatgattttggcgtgcgcgcccagtttttcggcttcggctttggcggtgcgcgctaaaaattcgggcgtgcattcgttgggcgcggcgttgcccaagtcgcggcagaggctttgtccgtaaacttgcgcttcggcgacgcgcaaggcttctttgacggcggcttcgtgcgcggtatggaacacggcagtttcaaatttggcgggcttggcttcttttttgtagcggtcgaaacggtaggcggcattgccgaacgcaatcgcaaacgcttcggcaacggctgcagcctgcgcttcttcaaagacgtgaacgtccacattgaccgtttcctgattttgcgcccatttggcggcttcggcggcggccttgttcaatgcggcgcggccggtgcttttcagacagcatacggcaacagcctgcaaaccgttgcctgtcgggatttttgtgtcggcaaaattttgaccttcttcaagcgaagacaaaagggcaaggacggtcgggttgctcagttgcgatgcttcggtgcagacaaataactgtgcgcctgcctgctgttcctgcaagatttcggtttttgtgctaaattccacgtttattctcctgattgagacggttgtcggtagttttcggacggcctttcgctcaaaagaccgtctgaagacggctggcacgattgtaccccatttgaagcaccgtctgaaaccttgcgcggacaatccgcctgcgccgaaccgcttaccgcccccctgaccgcgattctatgatttatcaaagaaacctcatcaaagaactctcttttaccgccgtcggcattttcgtcgtcctcttggcggtattggtctccacgcaggcaatcaacctgctcggccgtgccgccgacgggcgtgtcgccatcgatgccgtgttggcattggtcggcttctgggtcatcggtatgacgccgcttttgctggtgttgaccgcatttatcagtacgttgaccgtgttgacccgctactggcgcgacagcgaaatgtcggtctggctatcctgcggattggcattgaaacaatggatacgcccggtgatgcagtttgccgtgccgtttgccgttttggttgccgtcatgcagctttgggtgataccgtgggcagagctacgcagccgcgaatacgctgaaatcctgaagcagaagcaggaattgtctttggtggaggcaggcgagttcaacagtttgggcaagcgcaacggcagggtttattttgtcgaaaccttcgataccgaatccggcatcatgaaaaacctgttcctgcgcgaacaggacaaaaacggcggcgacaacatcatcttcgccaaagaaggtaacttctcgctgaacgacaacaaacgcacgctcgaattgcgccacggctaccgttacagcggcacgcccggacgcgccgactacaatcaggtttccttccaaaaactcaacctgattatcagcaccacgcccaaactcatcgaccccgtttcccaccgccgtaccattccgaccgcccaactgattggcagcagcaacccgcaacatcaggcggaattgatgtggcgcatctcgctgaccgtcagcgtcctcctactctgcctgcttgccgtgccgctttcctatttcaacccgcgcagcggacatacctacaatatcttgattgccatcggtttgtttttaatttaccaaaacgggctgaccctgctttttgaagccgtggaagacggcaaaatccatttttggctcggactgctgcctatgcacattatcatgtttgccgttgcactcatcctgttgcgcgtccgcagtatgcccagccagcccttctggcaggcggttggcaaaagtctgacattgaaaggcggaaaatgaacctgatttcacgttacatcatccgtcaaatggcggttatggcggtttacgcgctccttgccttcctcgctttgtacagcttttttgaaatcctgtacgaaaccggcaacctcggcaaaggcagttacggcatatgggaaatgctgggctacaccgccctcaaaatgcccgcccgcgcctacgaactgattcccctcgccgtccttatcggcggactggtctccctcagccagcttgccgccggcagcgaactgaccgtcatcaaagccagcggcatgagcaccaaaaagctgctgttgattctgtcgcagttcggttttatttttgctattgccaccgtcgcgctcggcgaatgggttgcgcccacactgagccaaaaagccgaaaacatcaaagccgccgccatcaacggcaaaatcagcaccggcaataccggcctttggctgaaagaaaaaaacagcattatcaatgtgcgcgaaatgttgcccgaccatacgcttttgggcatcaaaatttgggcgcgcaacgataaaaacgaattggcagaggcagtggaagccgattccgccgttttgaacagcgacggcagttggcagttgaaaaacatccgccgcagcacgcttggcgaagacaaagtcgaggtctctattgcggctgaagaaaactggccgatttccgtcaaacgcaacctgatggacgtattgctcgtcaaacccgaccaaatgtccgtcggcgaactgaccacctacatccgccacctccaaaacaacagccaaaacacccgaatctacgccatcgcatggtggcgcaaattggtttaccccgccgcagcctgggtgatggcgctcgtcgcctttgcctttaccccgcaaaccacccgccacggcaatatgggcttaaaactcttcggcggcatctgtctcggattgctgttccaccttgccggacggctcttcgggtttaccagccaactctacggcatcccgcccttcctcgccggcgcactacctaccatagccttcgccttgctcgccgtttggctgatacgcaaacaggaaaaacgttgaaccaatgccgtctgaacctctcttcagacggcatttgttttcattgacacattcccacagacagatagccgttccctattacattacctgtcataacagttccatttttgttaaaactagtctatgatagcggtacaaatattgtttacaatatttaacgcaaatcatttgcaacccgacaaaagaaaaacagaaaaaggaacaaagagatgttagaagcctatcgtaaagccgccgccgagcgcgccgccctcggcattcccgccctccctttgaacgcgcagcaaaccgccgatttggttgagctgctgaaaagcccgcccgcaggcgaaggcgagttcttggtcgaactgcttgcccaccgtgttccgcccggtgtggacgatgccgccaaagtcaaagcctcattcctggctgccgttgccgaaggcagcgcgtccagcccgctgatctcccccgaatatgcgaccgaactcttaggtacaatgctcggcggttacaatattcacgccttaatcgaactcttggacgacgacaaactcgcgtccattgctgccaaaggcttgaaacatacgcttctgatgttcgattccttccacgacgttcaagaaaaagccgaaaaaggcaacaaatacgcgcaagaagttttgcaatcttgggcagatgccgaatggttcgcctcacgcgccaaagttcccgaaaaaatcaccgttaccgttttcaaagttgacggcgaaaccaatacagacgacctctcccccgcgcccgacgcgtggagtcgtcccgatattccgctgcacgcgctggccatgctgaaaaacccgcgcgacggcatcacgcccgacaaaccgggcgaagtcggtccgattaaattgttggaagaactcaaagccaaaggccatccggttgcttacgtcggcgacgtggtcggtactggttcttcacgcaaatccgcgaccaactccgtcatttggcataccggcgaagacattccgttcgtgccgaacaaacgcttcggcggcgtatgtttgggcggcaaaatcgcgccgattttcttcaatacccaagaagattccggcgcgctgccgattgaagtcgatgtatctgctctaaaaatgggcgatgtcgtcgatatcctgccttatgaaggcaaaatcgtgaaaaacggcgagactgttgccgagtttgaattgaaatcacaagtattgctggacgaagtgcaagccggcggccgtatcaacctgattatcggccgaggtctgaccgccaaagcgcgcgaagccctgaaactgcctgcctctactgcattccgcctgccgcaagcgcctgccgaaagcaaagccggtttcaccttggcgcaaaaaatggtcggccgcgcctgcggtctgcccgaaggacaaggcgtgcgcccgggtacttactgcgaaccgcgtatgacgacggtcggctcgcaagacacgaccggcccgatgacccgcgacgagttgaaagacttggcttgtttgggcttctccgccgatatggtgatgcagtctttctgccacaccgccgcctatccgaaacctgtcgatgtaaaaacccataaagaactgcccgcctttatttccacccgtggcggcgtgtcactgcgtccgggcgacggcgtcatccactcgtggctcaaccgcctgctgctgcccgataccgtcggcaccggcggcgacagccatacccgtttccccatcggtatttccttccccgccggctccggcttggttgcctttgccgccgcaacgggcgtaatgccgctcgatatgcccgagtctgtattggtacgcttcagcggcaagctgcaaccgggcgtaaccctgcgcgatttggtgaacgccatcccgctgtacgcaatcaaacaaggtttgctgaccgttgccaaagccggtaagaaaaacatcttctccggccgcatcctcgaaatcgaaggcctgcctgatttgaaagtggaacaagcctttgaattgaccgacgcatccgccgaacgctccgccgccggctgtaccgtgaagctcaacaaagagccgattatcgagtacatgaaatccaacgtcgtgttgatgaaaaacatgattgccaacggctatcaagacccgcgcactttggaacgccgcatcaaagctatggaaaaatggctggcaaatcccgagttgctcgaagcggataaagatgccgaatacgccgccgtgattgaaatcaacatggacgacatcaaagagccgattatcgcctgcccgaacgacccggacgacgtgtgcttcatgtccgaacgctccggcaccaaaatcgacgaagtattcatcggttcgtgtatgaccaacatcggccacttccgcgccgcctccaaacttttggaaggcaaggcagacacccccgtccgcctgtggattgcgccgccgaccaaaatggacgcgaaacaattgtccgacgaaggacactacggcgtactcggacgtgccggcgcgcgtatggaaatgccgggttgctccttatgtatgggtaatcaggcgcaagtacgcgaaggtgcgaccgttatgtccacctccacccgcaacttcccgaaccgtttgggtaaaaacacctttgtttacctcggttcggcggaattggcagcgatttgctccaaactgggtaaaatcccgaccgttgaagaatatcaagccaatatcggcatcatcaacgaacagggcgataaaatctaccgctatatgaacttcaacgaaatcgacagctacaacgaagtagccgagaccgtgaacgtttaatccccgtcatccgtatgaagtaagggattgaccgcaatgccgtctgaacaaccttcagacggcattgcaacattccgctaacccttctttccgcaaacgctgcaaatacggcgttcacgcccccacataaaggaaacgacagtgaacctgaaaaaccgccattttctgaaacttttagacttcacgccggaagaaatcaccgcctacctcgaccttgccgccgaattgaaagccgccaaaaaagcagggcgcgagattcagcggatgaaagggaaaaacatcgccctgatttttgaaaaaacctctactcggacgcgctgcgcgtttgaagtcgccgcgcgcgatcaaggcgcgggagtgacttatttagagccgtccgccagccaaatcgggcataaggaaagcatcaaagacaccgcccgcgtgttgggcaggatgtacgatgccatcgaatatcgcggtttcggtcaggaagttgttgaagaattggcgaaatacgcgggcgtacccgtgttcaacgggctgaccaacgagttccatcccacacaaatgcttgccgacgcactgactatgcgcgaacacagcggcaaacctttgaaccaaaccgcgtttgcctacgtcggcgacgcgcgttacaacatgggcaattccctgctgattttaggggcaaaattggggatggacgtgcgtatcggcgcaccgcaaagcctgtggccgtctgaaggcattattgccgccgcacacgccgccgccaaagaaaccggcgcaaaaattaccctgaccgaaaacgcgcatgaagccgtgaagaatgttgattttattcataccgatgtgtgggtcagcatgggcgagccgaaagaagtctggcaggaacgcatcgatttgctgaaagattaccgcgttacgcccgaactgatggcggcatcgggcaatccgcaagtcaaattcatgcactgcctgcccgccttccacaaccgcgaaaccaaagtcggcgaatggatttacgaaaccttcgggctgaacggtgtggaagttacagaagaaatattcgaaagccccgccagcatcgtgttcgatcaggcggaaaaccgtatgcacacgattaaagcggtaatggtcgcggctctgggcgactgacagaactgtgcctgtttaaattcatccgcaacacagataccgtctgaacacgatgttcagacggtatccatatatagtggattaaatttaaaccagtacggcgttgcctcgccttgccgtactatttgtactgtctgcggcttcgtcgccttgtcctgatttttgttaatccactataaaaaaactgcctacacgatgtgtaggtagtcccgtttgaaaacaatcagtttttgtcttggtcaaccaatttgttggcagtaatccaaggcatcatggcacgcagttgtgcgccgactttttcaacttggtggtcggcattcagacggcggcgggcagtcatagacgcatagttgacattaccctcttggataaacatttttgcgtattcgccggtttgaatgcgtttcagggcattgcgcatggcttctttgctggaagcattgaccacttcagggccggtaacgtattcgccgtactccgcattgttggaaatggagtagttcatattggcaataccgccttcgaaaatcaggtcaacgatcagtttcatttcgtgcagacattcgaagtaagccatttcaggcgcgtaaccggcttcggtcagggtttcaaaacccgccttgatcaactcgaccacgccgccgcacaatacggcttgttcgccgaacagatcggtttcggtttcttcgcggaaagtggtttcaatcacaccgcctttggtgccgccgttggcagccgcataagacagggcgatgtctttggctttgccggaattgtcttggtaaacggcaatcagagaaggcacgccgccgccgcgtttgtattcactgcgtacggtatggcccggacctttgggggcaaccataatcacgtccaagtcggcacgcggaacgatttggttgtagtgcacgttgaagccgtgtgcaaatgccagcgttgcgccttctttcaaattggctgtaacttcggcgtgatagacggcaggcatggtttcgtcaggcagcagcagcataacgacatcggcttctttggtcgcttcagcaacggttttgacgacatgaccggctgcttcggcttttttccaagaagaaccttggcgcagaccaatcaccacgtttacacccgaatctttcaggttggcggcatgggcatgaccttgcgaaccgtaaccgatgatggcaacggttttgcctttgattagggacagatcggcatctttatcgtaatagacttgcatttgatttcctttaaggtaaatggttgtcgaagccttaaaatgttgagcggcttcggacgggttaaacagagtgtgccgcttaatcggcaacttcattcatcaatacgatttccaacgcttcggttttgccgtcgacggactggacgaaggcttggaaatgcgcgctggcgttatgttcgtcaatagctgcttgagatttccaattttccacgaaaacaaaacggttcggtttgccgatttcctgatggagatcgtagctgatgttgccctcttctgcacggctggctttgaccagttctttaaactgtgctgccagtgtttctgtgtattccggtttgacggtaaccagtgcgacaattttaatgttcgacataaatctctcctgccgttcgtttttcagacgacattcaaataccgtgccgtctgaaaggttacggcgttaaattttcaaaatacgctcaccgcgaccgatgccggccgcgcctgtgcgtacggtttccaaaatttgggcgcgtccgaccgtttccaaaaaggaatccagcttgtctgtcgagccggtaatttcaatcgtatagctgcggtcggttacgtcgatgatgctgccccggtagatttcggtcaagcgtaaaaattcgtcgcggtctttgccggcggcacggacttttaccaacatcagttcgcgttcgacaaaacggctttcattcaaatcgaccactttaatcacttcaatcaatttattgagttgcttggtaatttgttcgatgacctgctcgtcgccgtgggtaacgatggtcatccgtgacagggttttgtcttcggtcggcgcaaccgccaaagaatcgatattgtaatcgcgtgcagagaacaaaccgaccacgcggctcatcgcacctgattcgttttcaatcagaacagataagatatgtcgcatttgtctctccttacgcctttccgtccgcacgcatatgcggcggaagtaccatttcgtccaaacctttgccgttgccgaccatgggcatcacattctgtttctggtcggtcaggaagtcgataaacaccagcctgtctttttggttcaatgcttccaacaacgcaccttccacatcagacttcttgtccacgcggataccgatatggccgtatgcctcggcaagtttgacgaaatcgggcaaagaatcgaaataggtttccgactctcgtccgccgtaatatatttcctgccactggcgtaccataccgagataaccgttgttcagcgtaatgacgttaaccggaatccgatattggaaacaggtggacagctcttggatgttcatctggatcgagccgtcgccggtgatacagaatacgtcttgatccggggcggcaagttttgcaccaatcgcataaggcagacccacgcccatcgtacccaaaccgccggaattgagccattggcgcggacgttcgaagggataatattgagccgcaaacatttgatgctgccctacatccgatgtgatgattgccgaattgccggtaatctcggcaagcttctgaatcacatattgtggcttgataatttcgctgccgttgtcaaaccacaagcaatctcgggaacgccattcctctatggttttccaccatttgcccaaagcatcttcagacggcacggactcttgtttttgccacagcgcaaccatctcggacaaaacgtttttcacgtcgccgacaatcggaatgtccaccttcacgcgtttggcgatgctggaaggatcgacatcgatatggataaccttcttcgccttctcgaaaaatttggacggtacggaaaccacacggtcgtcaaaacgcgcacctacggcaagaacgacatccgcattctgcatggcaaggtttgcctcgtaagtaccgtgcataccgagcataccgaggaattggcggtcgccggaaggataagcgcccaagcccatcagcgtacccgtgcacggagcacccgtcattcggacaaatcgggtcagctcttcagaagcattacccaacaccacgccgccgccaaaatagacgaccggacgtttggcagatgccaacatctgcacggcctttttaatctgaccgatatgtccttgaacaaccggttgatacgaacggataaaaatgtcttcctgaggatagctgaatttcgccatcgcctgcgtaacatctttcgggacatcaaccaccacgggccccggtcggccgcttgcggcaatttggaacgcctttttaatggtttccgccaactcattgatgtccgtaaccaggaaattgtgtttgacgcacggacgggtaatacccaccgtatcaacttcttggaacgcatccgtaccaatcagggaattgcctacctgcccgctgatgaccaccatcggaatcgaatccgtataggcagtagcaataccggtcagtgcattggtaacgcccgggccggatgtaaccaatgccacgcccaccttaccgctgacgcgcgcatacgcatctgccgcgtgtactgccgcctgctcatggcgggtaagaatgtgtttgaatttattgagttggaaaagggcatcgtagatttcgataaccgcaccgccgggataaccgaaaacgtactcgacaccttcggctttgagactctgcactatgatttgcgcgcctgataactgcataacgacctcttttatacggtttcaaaccaatagggacaaaccgctttgccacagcacctgtaatgcaattccaccaagcagcgatttagggtacgcgcattgggggaacacggcaacagacggattatccaatcaattggaaaggaacacagagtttgtgaaaaagagtagaaacgataacgcaaaccgacagttcaatcaagaaaaatctttcatcttttaatattttttgaaagcagagaaattattgattgattttaaaagaataaaatcaggagtaccttttttgaaagatggaaattgttgacagtttgtgtaggaggggcagatgtgaaaaacccttcttcgatatcaagaattgtaaaatttacagggtttcatcccaataaagactcgggatattgattgaacttgattttatttttgatatatcaaaaatattcccaaccatacttcctgaaaatggctcattgcaccggactgtattggacggcattgacagaaccaagagggctaacaacgacttaatatattgattgtatagtggattaacaaaaatcaggacaaggcgacgaagctgcagacagtacaaatagtacggaaccgattcacttggtgcttcagcaccttagagaatcgttctctttgagctaaggcgaggcaacgccgtactggtttaaatttaatccactatatttagttttatctatttcattaaacagcaatagacaaaaaaaataaccgctctaaaagcggttgtggtgcccagggtcggactcgaaccgacacaccttgcggcgggggattttgagtcccctgcgtctaccaatttcgccacctgggctggtgaagaagtcgtcattataatggcttttgaaattctgtaaaccttttttttgaaattattttatctgtttttattttatttttgattttaaatagaatttttattattttaatcttactgttctttccgctccaaagattctgtatgattcggcaattcctgccgtgcagacaacgtaaaaaaatactacattaaatctgccaaacgcgttaagatggaaatattcaaattccgtacgaatcaggttttgctatttattcttgggagattgtcatgttttccgtaccgcgttcctttttgccgggcgttttcgtacttgccgcgcttgccgcctgcaaacctcaagacaacagtgcggcgcaagtcgcttcttcaagtgcatccgcgtcggctgcggaaaatgcggcaaagccgcaaacgcgcggtacggatatgcgtaaggaagacatcggcggcgatttcacgctgaccgacggcgaaggcaagcctttcaacctgagcgatttgaaaggcaaggtcgtgattctgtctttcggctttacgcactgtcccgatgtctgcccgacagagcttttgacgtacagcgacacgttgaagcagttgggcgggcaggctaaggacgtgaaagtggtgttcgtcagcatcgatccggaacgcgacacgcctgaaatcatcggcaagtatgccaaacagttcaatccggactttatcggtctgacggcaacgggcggccaaaacctgccggtcatcaagcagcaataccgcgtggtttctgccaaagtcaatcaaaaagacgacagcgaaaactatttggtcgaccactcttccggtgcgtatctcatcgacaaaaacggtgaggttgccattttctcgccttacggaagcgagccggaaacgattgctgccgatgtaaggaccctgctctgataaaaccgtatgccgtctgcaccgtcggcgcctattcagacggcattattgtttcaaccgacaaaggacatccacaccatgcaggataatgctttgaccatcgccttatccaaggggcgcatttttgaggagacgctgccgctgcttgccgctgccggcattgttccgactgaagagcctgaaaaatcgcgcaagctgattatcgggacgaaccatgaaaacatccgccttgtcattgtccgcgcaaccgatgtgccgacttatgtccgctacggcgcggcggacttcggcattgcgggcaaagacgtgctgatcgaacacggcggcacggggctttaccggcctttggatttggagattgccaagtgccgcatgatggttgctgtgcgtaaagggtttgattacgaagcagcttcgcaacccggatgccgtctgaagattgccacaaagtatcctgaaatcgcggcatctcattttgccggcaagggtgtccatgtggacattatcaaactgtacggctcgatggaacttgcgccgctggtcggcttgagcgatgcgattgtggacttggtttcgacgggcaacaccttgaaggcaaacggcttggaagcagtcgaacacatcgtcgacatttccagccgcctggtggtcaacaaggctgctttgaaaacgaaatacgcgctgctggagccgattattcaggcgttcggcggcgcagtgaaggcgaagtaagcatccatttgaataaagatgcgttttcagacgaccctatccgttcccgccgacaggtcgtctgaaaatatcaccggcagtaaactgtataggagaagttaaaatggttgcaaaaataaaaaaattctcagattcaaccctttccgttttgaataacggcgagcgtcggttttatgtctattgtctgaccgacctgaaaaaagacaaaatcctctacatcggcaaaggctgcggtaatcgtatcttcgagcatgaatgggttgctagtcgttcacaagatccagtctccggcgagattatcgatcggaaactcaaagccatctccaaatgcaagaaactcggtcgctatatcatcagctatcatctgactgaagtcgaagcactcgccgccgaatctgccttaattcattttgttaaatctgtcttgggtaaaaaactcaaaaataaaattgccgggcatggtccgggtggtattagcgtagaagaactagatcgccgctttggattctcttctctcccacttaacgagattaaccccgacgggctgattctcgccatcaaaatccacaatgctttcgatttagatactgacgaagaattagactaccttttcgacaaccaagacgatgccaacctcaaatcgcgtacgttgggcaactgggttatcggtaaagatgttgcttcaaaagtgaaatacgttatcggcgttcacaccggtctgcaaaacgctgttgtcagtgcatacgaagtggacggttttgaaacaatggttgaggaaaccaaaaacggtagaaaacaatcccgttaccgtttccgcactacctctcgtagcgaagaggtattagccaaactcggtctgcaacaaaaatgcctgcccgaattgaagtttggtagcgggggagaaaaagcgtatatcagacccaaaacagagacagaaactgaacaagagaatattcagacgacccccaatccaaaaataaaaaaggaaaaaaccaaatcatgaaaaaactcaacacccaatcgcccgatttccaagccggactcaaagccctgctggcttttgaaaccgcgcaaaaccccgaaaccgaacgcatcgtcgccgacatttgcgccgacgtgcaaaagcgcggcgatgcggctttgattgaatacaccaacaaattcgatcagacaaacgctaaaagcatcgatgatttaatactcacgcaagccgatttgaacgcggcgttcgagcgcattccgaacgacgttcagacggcattgcagaccgccgcccgccgtgtcgaaagctaccaccaacgccaaaaaatggaatcgtggagctacaccgatgaagacggcacgctgttgggacaacaaatcacaccgcttgaccgcgtcggcatttacgtccccggcggcaaggcggcgtatccgagttccgtcatcatgaacgccatgcccgcccacgtcgcaggtgtgaaagaaatcatcatggtcgtgccgacaccaaaaggcgaacgcaacgacatcgtacttgccgccgcatacgtcgccggcgtaaccaaagtcttcaccgtcggcggcgcgcaggcggttgccgccctcgcctacggcacggaaaccatcccccaagtcgataaaatcaccggtccgggcaacgccttcgtcgccgccgccaaacgccgcgtgttcggcgtggtcggcatcgacatggtggcggggccgtctgaaatcctggtcatcgccgacggcacgacacctgccgattgggtggcgatggatttgttcagccaggccgaacacgacgaaattgcccaagccatcctcatcggcacgtcgcaagcgtatctcgacgaagtagaagccgctatggaccgcctgatcgaaactatgccgcgccgcgacatcatcgaagcctcgctcggcaacaggggcgcgatgatactcgccaaagacttggacgaagcctgcgaaatcgccaactacatttcccccgaacacttggaactgtcagtcgaaaacccgcaggaatgggcgaaaaaaatccgccacgccggtgcgattttcatgggacgctacaccggcgaaagcctcggcgactactgcgccggtccaaaccatgtgttgcccaccagccgaaccgcccgcttttcctcgcctttggggacatatgatttccaaaaacgctccagcctgattcaggtttcggaacagggcgcgcaaaaattaggcgaaaccgccagcgtgctggcacacggcgaaagcctgaccgcccacgcccgcgcggcagagttccgtatgaaataatgccgaaacggcgtacaggcatattccaaccattaaggaaacacgatgaaatccgtccgctccttcatccgcgacgacatacaagctatgtcggcatatcagattgccgacgttccgcccggctttgccaaactcgattcgatggaaagtcccgtccacccttttgccggacatgaaacgctgttgcaggaatggcaggcacggcttgccgccgcgcccatccatctttaccccaatccctccggcagcggtttacaggaagcattacgttcggcgttcgacattcccgactgcgccgacatcgcgctgggcaacggttcggacgaactgatacagttcatcacgatgctgaccgccaaaccgggcgcggcaatgttggcagccgaacccagtttcgtcatgtaccgccacaacgccgcgctgtacggcatggattatgtcggcgttccactgaacggagatttcaccctcaacctgcccgccgtcctcgaagccgtcaggaaacaccgccctgccctgacctttatcgcctaccccaacaaccccaccggcgtatgcttcacgcgtgccgaaatcgaagccgtcatcgaagcttcagacggcatcgtcgtcgtcgatgaagcctacggcgcattcaacggcgacagcttcctgccgcaggcaggcaggattcccaacctgatagtcttacgcaccctcagcaaaatcggttttgccggactgcgtatcggttatgcggcaggctgccccgaagtcatcggcgaactgcaaaaaatcctgccgccctacaatatgaaccaattgagcctgaccactgccaaactcgccctgcggcactacggcattatctctgccaacatcgacagcctgaaaaacgaacgcgaacggatgttcgccgaattgggcaaaatatgccgtctgaacaccttttcaagtcaggcaaacttcattaccatacgcgtacccgatgccgatttgttgtttgacacgctcaaacaaaaccgcatcttggttaaaaaactgcatggcgcgcacccgcttttggaacactgcctgcgcattaccgtaggcagccccgcacaaaacgatgccgttctcaacatcattcgccaactttactgccaaccaacggatttcctatgaatttgactaaaacacaacgccaactgcacaactttctgaccctcgcccaagaagcaggttcgctgtccaagctcgccaaactctgcggctaccgtacccccgtcgcactctacaaactcaaacaacgccttgaaaagcaggcagaagacccagatgcacgcggcatccgtcccagcctgatggcaaaactcgaaaaacacaccggcaaacccaaaggctggctcgacagaaaacaccgcgaacgcactgtccccgaaaccgccgcagaaagcaccggaactgccgaaacccaaattgccgaaaccgcatctgctgccggctgccgcagcgttaccgtcaaccgcaatacctgcgaaacccaaatcaccgtctccatcaacctcgacggcagcggcaaaagcaggctggataccggcgtacccttcctcgaacacatgatcgatcaaatcgcccgccacggcatgattgacatcgacatcagctgcaaaggcgacctgcacatcgacgaccaccacaccgccgaagacatcggcatcacactcggacaagcaatccggcaggcactcggcgacaaaaaaggcatccgccgttacggacattcctacgtcccgctcgacgaagccctcagccgcgtcgtcatcgacctttccggccgccccggactcgtgtacaacatcgaatttacccgcgcactaatcggacgtttcgatgtcgatttgtttgaagaatttttccacggcatcgtcaaccacagtatgatgaccctgcacatcgacaacctcagcggcaaaaacgcccaccatcaggcggaaaccgtattcaaagccttcgggcgcgccctgcgtatggcagtcgaacacgacccgcgcatggcaggacagaccccctcgaccaaaggcacgctgaccgcataaaaaaccataccgtctgaaacacccgcaggcttttcagacggtatcggaacagataagattacactacactacaaacagaaaaggagtaaacatcatgtccgcaaacgaatacgcacaaatcggctggataggcttagggcaaatgggtctgcctatggtaacgcggctcttggacggcggcatcgaagtcggcgtatacaaccgctcgcccgacaaaactgcccccatctccgccaaaggcgcaaaagtttacggcaacaccgccgaactcgtccgcgactatcccgtcattttcctgatggtttccgactatgccgccgtgtgcgacatcctgaacggagtccgcgacggattggccggcaaaatcatcgtcaacatgagcaccatctccccgaccgaaaacctcgccgtcaaagcacttgtcgaagccgcaggcggacagtttgccgaagcacccgtttccggatcggtcgggcccgccaccaacggcacgctgctgattctgttcggcggcagcgaagccgttttaaacccgctgcaaaaaatattttccctcgtcggcaaaaaaaccttccatttcggcgatgtcggcaaaggttcgggcgcgaaactcgtcttgaactcgctcttgggcattttcggcgaagcgtacagcgaagcgatgctgatggcgcggcagttcggcatcgataccgacaccatcgtcgaagccatcggcgrctcggcaatggactcgcccatgttccaaaccaaaaaatccctgtgggcaaaccgcgaattcccgcccgccttcgccctcaaacacgcctccaaagacctcaacctcgccgtcaaagagcttgaacaggcaggcaacaccctgcccgccgtcgaaaccgttgctgccagctaccgcaaagcagtcgaagccggctacggcgaacaggacgtttccggcgtttacctgaaactggcagaacactgattgccttttccaaacacaatgccgtctgaacatatttcagacggcatttttatcaccccacgcttaaaatcagtcccgattatgactatatagtggattaacaaaaatcaggacaaggcgacgaagccgcagacagtacaaatagtacggaaccgattcacttggtgcttcagcaccttagagaatcgttctctttgagctaaggcgaggcaacgccgtactggtttttgttaatccactataatccgcacaaatttagtcaatatcaagaccaattatgaaccaactcgaccaacttggcacccgtatcaacctgatttgcaatgtcttcgacaaatggatcgggcagcaggatctgaattacaacctctttgccgtactttataccctggcaaccgaaggcagccgcacgcaaaagcatatcggcgaaaagtggagcctgcccaaacagaccgtttcaggcgtatgcaaaacccttgccggacaagggttgattgaatggcaggaaggcgaacaggaccggcgcaaacggttgctgtcgttgaccgaaacaggcaaagcctatgccgcacctttaacagaaagcgcgcaggaattcagcgacaaagtatttgccacattcggcgacaagcgcacaactcggctgtttgccgatttggatgcactggctgaagtgatggaaaaaacaatctcggaaaataaaaaataggggggcaaatatgtggaaaatgttgaaacacatagcccaaacccaccgcaagcgattgattggcacattttccctggtcggactggaaaaccttttgatgctggtgtatccggtgtttggcggccgggcgatcaatgccgtgattgcgggggaggtgtggcaggcgttgctgtacgctttggttgtgcttttgatgtggctggtcggtgcggtgcggcggattgccgatacgcgcacgtttacgcggatttataccgaaatcgccgtgccggtcgtgttggaacagcggcagcgacaagtcccgcattcggcggtaactgcgcgggttgccctgtcgcgtgagtttgtcagcttttttgaagaacacctgccgattgccgcgacatccgtcgtatccatattcggcgcgtgcatcatgctgctggtgctggaattttgggtcggcgtgtcggcggtgggcatacttgcgttgtttttatggcttttgccacgttttgccgccatcagcgaaaacctgtatttccgcctgaacaacagcttggaacgcgacaaccactttatccgaaaaggcgaccggcggcagctgtaccgccattacggactgcttgcgcgcctgcgtgtgctgatttccaaccgcgaagccttcggctatctctgcgtcggcacggcgatgggtattttgttcggctttgcttttgtgatgatgacgctcaaaggctacagcagcgcggggcatgtctattcggtcggcacttatctgtggatgtttgccatgagtttggacgacgtgccgcgattggtcgaacaatattccaatttgaaagacatcggacaacggatagagtggtcggaacggaacatcaaagccggaacttgaaaaatgccgtctgaacacgcttcagacggcatttccatccgttcggcaaactacatcacatccgcccgccggttgacaagtttggcaaacaacttttcaacagaagcttccgcctgcaaaccaatgcgctggatcaggctttgcttctcctgatatttcacttcgataacctgtttgttttcaaacgctttcaacaacaaatcatcactggtcgaaatctcgtcaatcaagttcaacgccaacgcctgccgaccgaaccaatgctcgcccgttgccacttcctcaatatccaattgagggcggttctcgctgacaaactgcttgaacaactgatgcgtttcctccagttcctgtcggaatttctgtttgcccttttccgtattttcacccataaaagtaaccgtgcgcttaaattcgcccgccgtcatcacatccacatcaatatcatgttttttcaacaggcggtggatattcggtacttccgccaccacacccaccgaaccgacaatcgcaaacggagcggaagcaattttatccgccacacacgccatcatataaccgccgctcgccgccaccttatcgacggcgacggtcagcggaatattgcgttcgcgcaaacgcytaagctgcgaagccgccaaaccgtaaccgtgaaccacgccgcccggactttccaatctgagcagaacctcatcttcaggcttggcaatcaaaagcaccgccgtaatctcatgacgcaaggattctacggcgtgtgcatacaaatcgccgtcaaaatccaacacaaaaaggcgggatttttgcgtttcggcagatttctccccaccctccttcaaacgctttttctctgctttggcttccgccttttcctttttcttttcctctttttcctgatgttttgcctcttccccgcttaaaaagaatgcttcaaacgattgccgctgttttttataattttccgaaaaatccgtcagtacgacactgccgctttccgactgtttcttactctgtacgatagccaacacaatcagcgcaattgcgccgaacacggtaagcagttcgagcaggaaaataccgtaattcagtaaaatttctttccacattgattggatttcctcttgttcaggcatgaacatgtcaatattgtccatcaccgtccgacagataaaaaaataaccgcttggagcggcattgtcattttcagcttggtgcccggagccggaatcgaaccggcacgggatgtttagtcccgacggattttaagtccgttgtgtctacctatttcaccacccgggcatttgtgaaaggtggaggcgggggcgcggattttaaccggcctgtatgaagattgcactcctcatagcataaacactctgccaccccgccatagtacgataatggaggcgagagtcggaatcgaaccggcgtagacggatttgcaatccgctgcataaccactttgctatctcgccctaaaactggcttatctaaaaaacttggagcgggaaacgagtctcgaactcgcgacctcaaccttggcaaggttgcgctctaccaactgagctattcccgcgcgttcaaacatatcggtttttggagcgggaaacgagtctcgaactcgcgacctcaaccttggcaaggttgcgctctaccaactgagctattcccgcgttgatatgtttgaaataaaacttggagcgggaaacgagtctcgaactcgcgacctcaaccttggcaaggttgcgctctaccaactgagctattcccgcaatgattgcggaagaatgaaatttttggagcgggaaacgagtctcgaactcgcgacctcaaccttggcaaggttgcgctctaccaactgagctattcccgcccgatttcattctccgatatcgaagagacacaattattatggattctgtttttgccgtcaagctatttttatgtttttttcaggcgatttctttccacgccattttcagataatacagcatcgaccagactgtcagcaaagatgcgataaacatcaatacattgccgatgaatgcgaggttaaatccataaaaatcgggaaaattcagcagcagcaggaagattgccagcatttgcgcggcggttttaaacttaccgacggtggcgacggcaacgctgttccttttgcccatttgcgccatccattcgcgcaatgcggaaatggtaatttccctgccgatgatgatcatggcaaacaaaacataggtccggtcgagtttgaccagtaaaagcaaagagacggcgaccatcagcttgtcggcaacgggatcgaggaaggcgccgaaatccgaggtctgtttccacaaccttgccaaaaatccgtcaaaccagtcggtcaaggcggcaacggcaaaaatgacggcggcggtgagattaatcgtttcctccgcgaaccacggaaaaggcaggtaaaaaagggctgtcaggacaggaatgagcaagaccctcaaccatgtgaggaagatggggagattccaaggcatcggttttctctgtgcagactgtaaagttgtgattataacggttatcctcataacccaaaacgtaaaattgctgcatgggcattcccccgccccgccaatctgttttcacattcttttcaaacgcaggaaaatggcgggcaataaaagcaaaatacccagtttcaggctgaaaacggcaggttgtgccaacacttcgacaaggcggtcttccgtgcgggcaaaatctttattgcttatagacactgccactgttgcggtattccaacagaacgccgtttaaaaaacctttgccgacggtttcgcttaaaacggctctaacctgctccgccctgatggttctgccgatattgccgcctgtgcacaaactgtcgaacccatagcaggaaagccggtaatgctgcccgtctgcatccagtttgattgcccgtccgctgcggttgagggcggtaacggtcaattccgcatattcgaatgttttttcttgttcgtgaaatgccgtcaggtaaggtgcaataaaaacggcggacaacagcagacagcttatggcggcaaaccatacccagcgataatatagtggattaaatttaaaccagtacagcgttgcctcgccttagctcaaagagaacgattctctaaggtgctgaagcaccaagtgaatcggttccgtactatttgtactgtctgcggcttcgtcgccttgtcctgatttaaatttaatccactatatttcacgcttaccccttgtttctcaaatgccgtctgaaataagcggcttaatatattgtttacagtattgggaagcataacagacaaaatgccgtctgaaatattttcagacggcatttcttatccgaaacggattatttttgcgtttcaaccgcttccaatgcacgcagggcataagtgtaagcggcacccgcattcagggcaatggcggttgccaatgcacctgcgatttcgctgtcggtcgcaccggctttggtggcggcggcggcgtgaacactgatgcagctctcacaacgtgtagtaatggcaacggcgatggcaatcagttcgcgtgttttagcatcaagtgcctctgcagctgccgcttgttccaatgcgccgtaggcctgcagcattttaggatgcgccttacccagctcgccgaacgattttttaaccaatgcggtatgttctttccaatctttaaacattttcttttcctttctcttgcgtttaaccctgatacgcgcttgcgtatctgttttcgatgtgcgtattattgcaattattcagttgtgtttctcgtttaatcatctcattttatggttcaaaaagatttatggacattctggacaaactggtcgatttcgcccaattgacgggcagtgtggatgtgcagtgccttttgggcggacaatggtcggtacggcatgaaaccttgcaacgcgaaggattggtacacattgttacatcgggcagcggctatctctgcatcgacggcgaaacttccccgcgtccggtcagtacaggggatattgtatttttcccgcgcggcttgggtcatgtgttgagccacgacggaaaatgcggagaaagtttacaaccggatatgcggcagcacggtgcgtttacggtcaagcagtgcggcaacggacaggatatgagcctgttttgcgcccgtttccgctacgacacccacgccgatttgatgaacgggctgcctgaaaccgtttttctgaacattgcccatccgagtttacagtatgtggtttcaatgctgcaactggaaagcaaaaaacctttgacggggacggtttccatggtcaacgcattgtcgtccgtcctgctggtgcttatcctgcgcgcctatctcgaacaggataaggatgtcgaactctcgggcgtattgaaaggttggcaggacaaacgtttgggacatttaatccaaaaggtgatagacaaaccggaagacgaatggaatgtcgacaaaatggtggcggctgccaatatgtcgcgcgcgcaactgatgcgccgtttcaaaagccgggtcggactcagcccgcacgcctttgtgaaccatatccgcctgcaaaaaggcgcgttgctgctgaaaaaaaacccggattcggttttgtcggtcgcactgtcggtaggctttcagtcggaaacgcacttcggcaaggcgttcaaacggcaatatcacgtttcgccgggtcaataccggaaagaaggcgggcaaaaataaatcggggcttcaaacgcaaatgccgtctgaaaaggctttcatacagcatttgcgtaccgcgtcatttcaagggctgcatcttcatcacttccatcaaaaagttggtaaatgcggggttgttgggtttgacatccatatttttccaacgctgctgccagccgcgcaaggcattctggatatacagcttggactgttccgtattgattgcgccccgctggctgtctatcgccgaacgcaggtagatttcatacatactgtcatcgacggcattgcgtccgaccaggcgttttctgaagttgttcagatattgcgccgcctgaaccttggtcattttaccgatacccacctgatagcccaagcgcgtcgcttcatcgctgattttggcaacatccgtccaatgcgaagaggcaaggcggaaaccttttgcaggtgcttccgttttgacggtattgataggattcacggggatttccgtcaatgtgggcacataaatagactggcagccggaaagaactgccgcaatggaaagagggataaggtattttttcatgcccccattataatcaagtttgccttgagaaaacaaattgttcggcaagaaaaataaaatttcggcatcagaagcaggcaaaaacacattccacaagccttgccgcaaggtttacaatccgaccgtccttatcgcaacgaccgtttatggataccgcaaaaaaagacattttaggatcgggctggatgctggtggcggcggcctgctttaccattatgaacgtattgattaaagaggcatcggcaaaatttgccctcggcagcggcgaattggtcttttggcgcatgctgttttcaaccgttgcgctcggggctgccgccgtattgcgtcgggacaccttccgcacgccccattggaaaaaccacttaaaccgcagtatggtcgggacgggggcgatgctgctgctgttttacgcggtaacgcatctgcctttggccactggcgttaccctgagttacacctcgtcgatttttttggcggtattttccttcctgattttgaaagaacggatttccgtttacacgcaggcggtgctgctccttggttttgccggcgtggtattgctgcttaatccctcgttccgcagcggtcaggaaacggcggcactcgccgggctggcgggcggcgcgatgtccggctgggcgtatttgaaagtgcgcgaactgtctttggcgggcgaacccggctggcgcgtcgtgttttacctttccgtgacaggtgtggcgatgtcgtcggtttgggcgacgctgaccggctggcacaccctgtcctttccatcggcagtttatctgtcgtgcatcggcgtgtccgcgctgattgcccaactgtcgatgacgcgcgcctacaaagtcggcgacaaattcacggttgcctcgctttcctatatgaccgtcgttttttccgctctgtctgccgcattttttctgggcgaagagcttttctggcaggaaatactcggtatgtgcatcatcatcctcagcggtattttgagcagcatccgccccactgccttcaaacagcggctgcaatccctgttccgccaaagataaaaaatgccgtccgaacatccttcagacggcatatcgggctttatttccccgccttcacatcctgccactggcgcaccataaacttcaatgccgccggctggataggcaccatgataaagctgtttttcaaatcctcctcggttgggaaaatcgtattgtcgtttttaaattcgtcttccatcagctcacgcgcaggcttgctcgaaggcgcgtaagtaacgaaattgccgtttttcgccgacacttccgggtcgaggaagtcgttgatgtatttgtgcgcgttggcgacgtttttcgcatctttcggaatcacgaaagaatccacccaaatccccacgccctctttgggcatcatcacgcggattttttccttgccgcccgcttcttcggcacggcgtttggcgatgttcaaatcgccgccgaaaccgattgttacgcaggtatcgccgcgcgccaaatcatcgataaagccggacgaagtaaagcgtttgatattggggcggtttttcttgagtagggcggttgcctccctgatgtcttccgtattgctgctgttcgggtttttacccaaatagttcaacaccataggatagatttccgccgcgctgtccaaatagctgatgccgcattgcttgagtttggacgtgtattcggggtcgaacaccaaatcccactggttgtccggcagcttgtccgtacccaaagcctttttcacgcgttcggtattgatggcgaaggtatttgtcccccaataaaacggcacggcgtattcgtggccgggatcgaccccgtccatcagcctcatcatttcggggttgaggtgtttataattgggaatcagcgacttatcgattttctgatacgcacctgccttaatctgcctgcccacaaacgcattggacggcgcgacaatgtcgtaaccggacttgcctgtcagcaccttgctttccagcgtttcatcgctgtcgtacacatcataagtaaccttgatgccgtttttcttttcaaaatcggcaacggtttccggatcgacatattccgaccagttgtaaattttcaatacgttttggttttccgccggtgccggtttttcggcaggcggtttgtccgaaccgccgcacgctgcaagcagcaaagcagtcaggacggccaggggcagatgtttggtcattatcattccttgcatatcgggttggagaaagcggccattatagccgatattggcaacagggcttcagacggcattcaaaatcccgccacactcttccgaaaaccgccgcttccatagctagaaacagggatttgcggtaagataccgccgttcgttttccctgcttttaccatgacaagacatttgagagacattgaaaaaattatgaaaacctccgaactgcgccaaaaattcctaaaattttttgaaaccaaaggccacaccgtcgtccgctcttccagcctcgtgccgcacgacgacccgaccctgctgtttaccaacgcgggcatgaaccagtttaaagacgtattcttaggtttcgacaaacgcccgtacagccgcgccaccaccgcgcaaaaatgcgtacgcgcaggcggcaaacacaacgacttggaaaacgtcggctacaccgcccgccaccacaccttctttgaaatgatgggcaacttctccttcggcgactacttcaaacgcgacgccatccacttcgcttgggaatttctgacttcccccgaatggctcaacatccctaaagacaaactgttggcgaccgtttacgcggaagacgacgaagcctacaacatctggttgaacgaaatcggtatgccgtccgagcgcatcgtccgcatcggcgacaacaaaggcgcgaaatacgcatccgacaacttctggcaaatgggcgacaccggcccttgcggcccctgctccgaaattttctacgaccacggcgaagaaatctggggcggcattcccggcagtcccgaagaagacggcgaccgctggatcgaaatttggaactgcgtatttatgcagttcaaccgcgacgaacaaggcaatatgaacccgcttcccaaaccttccgtcgataccggtatgggcttggaacgcatagccgccgtcatgcagcatgttcacagcaactacgaaatcgacttgttccaagacctgctcaaagccgttgcccgcgaaaccggcgcgccgttcagaatggaagaacccagcctgaaagtcatcgccgaccacatccgctcctgctcgttcctgattgcagacggcgtcttgccttccaacgaaggccgcggctacgtattgcgccgcattatccgccgcgccgtgcgccacggttacaaactgggtcaaagcaaaccgttcttccacaaactcgttgccgatttggtcaaagagatgggcggtgcctaccctgaattgaaagaaaaacaagcccaaatcgaagaagcattgaaaaacgaagaaagccgttttgcccaaacgctggaaaccggtatggctttgttggaaaacgcgctggtcaaaggcggcaaaacactcggcggcgaaatcatcttcaaactctacgatacctacggtttcccatacgacttgactgccgacatctgccgcgaacgcaatatcgaaccggacgaagcaggcttcgagcgcgaaatggaagcccaacgcgcacgcgcacgcgccgcccaaagcttcaaagccaacgcccaactgccttatgacggtcaagacaccgagtttaaaggttatagcgaacgccaaaccgaatccaaagtcctcgccctctacaaagacggcgagcaagtcaacgaattgaacgaaggcgacagcggcgcagtcgtcatcgactttaccccgttctatgcagaatccggcggccaagtcggcgatgtcggctatatcttctcaggcgaaaaccgctttgaagtacgcgatacccaaaaaatcaaagcggccgtattcggtcaattcggcgtacaaacttcaggccgtctgaaagtcggcgacagcgttaccgccaaagtggacgacgaaatccgcaatgccaatatgcgcaaccacagcgcaacccacttgatgcacaaagccctgcgcgatgtattgggcagacacgtcgaacaaaaaggctctttggttaccgccgaatccacccgtttcgacatttcccatccccaagcggtaactgccgaagaaattgccgaagtagaacgccgcgtcaacgaagccattttggcgaacgttgccgtcaatgcagccattatgagcatggaagacgcgcaaaaaaccggcgcgatgatgctcttcggcgaaaaatacggcgaagaagtgcgcgtactgcaaatgggcggtttctctaccgaattgtgcggcggcacacacgtttcacgcaccggcgacatcggcctcttcaaaatcatcagcgaaggcggtattgccgcaggcgtgcgccgtatcgaagccatcaccggcctgaacgcactcaaatgggcgcaagagcaagagcgtttggtgaaagacattattgccgaaaccaaagcccaaaccgaaaaagacgtactggcaaaaatccaagcaggcgcggcacacgccaaagcattggaaaaagaattggcacgcgccaaagccgaactcgccgtccacgcaggcgccaaactcttggacgatgcaaaagacttgggcgcagccaaactcgttgccgcccaaatcgaagccgacgcagccgccctgcgcgaaatcgttaccgatttaaccggtaaatccgacaacgccgtgattcttttagcggcagtaaacgacggcaaagtctccctgtgcgccggcgtatccaaaccgttgaccggcaaagtgaaagcaggcgatctggttaaatttgcagccgaacaagtcggcggcaaaggcggcggcagaccagatttggcgcaagccggcggcacggatgccgacaaattgcccgccgtgttggatagcgtgaaagactgggtcggcgcgaagctggtttgatgtgggaaaggcagcctgaaaggtttcaggctgccttttgtgcaaagaggccgtctgaaaggtctcgtttgccgtaggttgggtcgcgacccaacaaattttgtgaagtataaaaatgttggtcatgacccaacctacctgcctttttgtacaaagaggctatctgaaaggccttgtttgccgtatggtgggtcgcgacccagcagatttttattagggtatgacccaagctacttgctacgataaaaaaggatttttaaatgagcattagccttattggactacacattaccatagcaatcattttgttttttactacaaattttatgggaaaaaaatcatctatatttggctattaccaactgtcttttagcgaagaaaatcactctccggcatttaatattttttacagagcatttacccctatattatttatcgttattttttcttgggttgttactagtcttgaaattcccatttctcttgaaaagataaactatgtagtaatttattattttataattagattgttatctgtatttgtttttgagaaaacacacatagttaactggtttaatcaactaacaatacccatactatccataacattatcatttatagtatataacaaaatgattttgcccaaaagttttctacttccatcctcacaagaagtagctactactttttgaatagcgcttggtggttacatatataatatattaaataatgaatcagggcatttaaaatcttataaagaaagaagagtaaattatgtaaaacacatgcacaaaaaatttgaaagttattttggtaaaattatagataaaataatcaaagaggatagttataataatgatgattttttaaccgataagaaaaaagcactaatatattcagttttaatttatgagaattttaataggggactagtttatagatattttgaaaaaaattattttgtactggtagaataaaaacatttggaataatgcaagtaacctcagcagagtacctttccaatgaggaaagtataaaaaaaggcggaaatattcttatggaaaaatacaatgaaaaatataatgaatctattgatggcaataaaactctctataaatcatattatgaatcaagaagagagagtattaaaaactacaacccagatgcaaaatacattaatgaaattgaatcaatttacatgatgcttggagaaatctatccaaatgcaccagacttcatgtcaccacattttgagggggactgctctgagggggaataaaatcattatttattctttattagttattagcaggatttgtcgggcataaatgcccgacctacaaattcaattttttcaaacctctgccaaatattttcatctttgcaaggctgtctgaaaacccaaaccccattttcagacggccttttttcgctaaaatccccataccgttcaatccgaaaacacaggagaatcatcatggaagttaccatctccgccatcatcaatggcgaatttgccgaccaatacggcaagcgcggtagtcagtttaatgaaaacgggatgctgatttaattctatttcctttgaaactaccaataacctgcctccatcataaaactaaaagcaagccgtagcctgcattcccacaaaccgcgtgcgttgccatgtcacacaccctacctgcgggcgacgcaaaccttaagagacctttgcaaaattccccaaaatcccctaaattcccaccaagacatttaggggatttctcatgagcaccttctttcaacaaaccgcccaagccatgattgccaaacacatcgaccgcttcccgctattgaagttggaccgggtgattgattggcagctgatcgaacaatacctgaaccgtcaaaaaacccgttaccttagagaccaccgcggccgtcctgcctatcccctgctgtccatgttcaaagccgtcctgctcggacaatggcacagcctctccgatcccgaactcgaacacagcctcattacccgcatcgatttcaacctgttttgccgttttgacgaactgagcatccccgattacagcaccttatgccgctaccgcaaccggctggcgcaagacaataccctgtctgaactgttggaactgattaaccgccaactgaccgaaaaaggtttaaaaatagagaaagcatccgctgccgtcgttgacgccaccattattcagaccgccggcagcaaacagcgtcaggccatagaagttgacgaagaaggacaaatcagcggtcaaaccacaccgagtaaggacagcgatgcccgttggataaagaaaaacggcctctacaaactcggttacaaacaacatacccgtaccgatgcagaaggctatatcgagaaactgcacattacccccgccaatgcccatgagtgcaaacacctgtcgccgttgttggaaggtctgcccaaaggtacgaccgtctatgccgacaaaggctatgacagtgcggaaaaccggcaacatctggaagaacatcagttgcaggacggcattatgcgcaaagcctgccgcaaccgcccgctgtcggaagtgcaaaccaagcgtaaccgatatttgtcgaagacccgttatgtggtcgaacaaagcttcggtacgctgcaccgtaaattccgctatgcccgggcagcctatttcggactgattaaagtgagtgcgcaaagccatctgaaggcgatgtgtttgaacctgttgaaagccgccaacaggctaagtgcgcccgctgccgcctaaaaggcagcccggatgcctgattatcgggtgtccggggaggattaagggggtgtttgggtaaaattaggcggtatttggggcgaaaacagccgaaaacctgtgttgggatttcggttgtcgtgagggaaaggaattttgcaaaggtctccagcagtttgcgcatacatgccgtaacggcaaccttatacggcttaccctcggacagcgggcgttggtggaaatcccgaataagcggttcaaaacgtgtcgctgccacggtagccatatacagtgccttaagcaccgcagaccttccgccaaagcagcggcttttgaatttggcttccccgctcttcctcgggtgcggggcaatgccgaccaaactcgctatccgtttgtgcgacagccgccccaattcaggtagcatcgccatcagcgtagccgtcgttatcgaaccgatgcctttgatttgctccgccacttgggctttgccgtcaaaatgcgtgtgggtgtggtcgtcgatttgtttgtccgattcgtcaatcagccggtcaaaatgggcaatcagttgtttgacgcttccgacttgcgtttcgtgaacctgatgcagacggtttttctcggcagtccgcatatccgccgattggttgcggcggttaaccaaggcttccaacacttcttccgcttctgtgggcgggtggtagggcatggtttgccaatcttctttctgtgccttcatctgtgcgaagaaggcaggcattttggcatctttggcgtcggttttggtcagcgactgcgattgggcaaactgatgcgtctgacgcgggttggcgataatcacggctatgcctgctcggtggatggctttggcggcggggatttcgagacctccggtactttccgtcacgacgagggcgaccttgtgttttttaaggtattcgatagtatgggcgatacctttggggttgttggtttcggttttggttttagacaaagacgaaacggcgatgacgaagtttcgtttggcgatgtcgatatagtgaattaacaaaaatcaggacaaggcggcgagccgcagacagtacggatagtacggaaccgattcacttggtgcttcagcaccttagagaatcgttctcttcgagctaaggcgaggcaacgtcgtactggtttttgttaattcactatatctgtgcgttacgacggcatgccgtctgaagggtgtttatgtctgcatctaagaaatttccgattcctttgagctatttcagcatcgcgctgggcttgtttgccttggggctgtcgtggcgttacggcgcgtctgtcgggctgctgcccgccttggccgccgaatcgctgcttgcggcggcttcggtcgtctggctcttgctggtggcggcatacctgatcaaaatgtttgcgtaccgaaacgattttttgtctgatttacgcgacttggtgcaatgctgcttcatcagcgcgattccgattaccgctatgctggagggactcgcgctgaagccctatcaggcaggcgcggcggcagtcctgatttatgtcggcgttgccggacagttggctttttcgatgtatcgggcggccggtctgtggcgcggcctgcattccttggaggcgacgacgccgattatttatctgcctacggttgcgacaaactttgtcagcgcgtcatctctggcggcgttggggcatcatgattatgcagctttgtttttcggcgcgggtatgttttcctggctgagcttggaagcctccatcttgggcaggctgcgcacggcggcaccggtcggcacggcggcgcgcggcgtggtcggcatccagcttgcgcccgcctttgtcggctgcggcgcgtattttgccgtcggcggtaaagtcgacggttttgcgttggcattaatcggctacggctgcctgcagcttttgttcttgctgcgcctgacccgctggttttgggaaggtggttttacgatgagcttttggggattttcattcggtttcgcggcaatggcaggatgcggtctgcatctggcggcttccggcgtattgtcgggcttggggctgacgcttgccaccgccggatcggcaggcgtggcgctgctgcttgtcggtacgctgcaccggatagcgacggggcgtttcttggtacgcagctgatgcgttttgccgccttgtcaaaaatgccgtctgaaacgctgggattcagacggcattttttatttcacacccttacaggtagaatttttcgatgactttcaaattgtcgtccaatttgtacaccaacggctgaccggtcgggatttccaagcccataatgtcttcgtcggaaatgccctcgatgtgttttgccagcgcgcgcagggagttgccgtgcgccgccaccaagacgcgtttgccgctcaaaatcgcgggggcgatttggtcttcccaaaacggcaatacgcgctccagcgttactttcaggttttcgccgtcgggtacgacatcggcaggcagatgggcatagcggcggtctttgtgtgcggaaaactcatcgtctttgtccaaaagcggcggcagggtgtcgtagctgcgccgccagatgcggacttgctcgtcgccgtattgttcggcggtttgttttttgtccaggccttgcagttggccgtagtggcgttcgttcagccgccacgttttgatttgcggtacgaacagttggtcggattcttccaaaacgatgttgcaggtcttaatcgcgcgggtcaggacggatgtgaaggcgatgtcgaactcatagccgttttctttcagtttcttgccggcggcggcagcctcggcaagcccctgctcgctcagcttcacgtcgcgccagcctgtaaacaggtttttcgcgttccattcgctttgtccgtggcggataaataccagttccatatcgtctccaatgtgtgaaagtgggaaagccttatttataacatattttcacatttcccgtatttgattcagattcagacacgcgcccactatggtttgccgttttgatttacaataatgtcctttgctttacattccgcatacacaatgaatacgcaagcgcacgccccacataccgattccaatacgctgatgctcggccgatacgccgaacgcgcctatctcgaatacgccatgagcgtggtcaaaggccgcgcgctgcctgaagtttcagacggccagaagcccgtgcagcggcgcattttgtttgccatgcgcgatatgggtttgacggcgggggcgaagccggtgaaatcggcgcgcgtggtcggcgagattttgggtaaataccacccgcacggcgacagttccgcctatgaggcgatggtgcggatggcgcaggattttaccttgcgctatcccttaatcgacggcatcggcaacttcggctcgcgcgacggcgacggggcggcggcgatgcgttacaccgaagcgcggctgacgccgattgcggaattgctgttgtccgaaatcaatcaggggacggtggattttgtgccgaactacgacggcgcgtttgacgaaccgctgcacctgcccgcccgcctgcctatggtgttgctcaacggcgcgtcaggcattgcggtgggcatggcgaccgagattccgccgcacaatttgaacgaagtgacgcaggcggcgattgcgttgttgaaaaagccgacgctggaaaccgccgacctgatgcaatatattcctgcccccgattttgccggcggcggtcaaatcatcacgccggcggacgaattgcgccggatttatgaaaccggcaagggcagcgtgcgcgtgcgtgcgcgttatgaaatcgaaaaattggcgcgcggacagtggcgcgtcatcgtaaccgagctgccgccgaacgccaattccgccaaaatccttgccgaaatcgaagagcaaaccaacccgaaaccgaaagcgggtaagaaacagctcaaccaagaccagctcaataccaaaaagctgatgctggatttaatcgaccgcgtgcgcgacgagtccgacggcgaacatcccgtgcgactggtattcgagccgaaatccagccgcatcgataccgataccttcatcaacacgctgatggcgcaaacttcgctggaaggcaatgtgtcgatgaacttggtgatgatgggtttggacaaccgccccgcgcagaaaaacctgaaaacgattttgcaggaatggctggatttccgcaccgtaaccgtaacacgccgtctgaaattccgtttgaaccaagtggaaaaacggctgcacatcctcgaaggccgtctgaaagtctttctgcacatcgacgaagtgattaaagtcatccgcgaatcagacgacccgaaagccgatttgatggcggcgttcgggctgaccgaaatccaagccgaagacattttggaaatccgcctgcgccagttggcgcgtttggagggtttcaaactcgaaaaagaattgaacgagttgcgcgaggaacaaggccgtctgaacatccttttgagcgacgaaaacgaaaaacgcaagctgattgtcaaagagatgcaggcggatatgaaacaatacggcgacgcgcgacgcacgctggtggaagaggccggacgcgccgtgctgacgcagaccaccgccgacgaacccatcacgctgatcctgtcggaaaaaggctggatacgcagccgcgccggacacaatctcgatttgagccaaaccgcgttcaaagaaggcgactgcctcaaacaaaccctcgaaggcagaacggttttacccgtcgtcatcctcgattcatcgggcagaacctacacgctcgatgccgccgaaatccccggagggcgcggcgacggcgtaccggtttcctccttaatcgagctgcaaaacggcgcgaaacccgttgcgatgttgacaggattgccggaacaacattatttattatcaagcagcagcggctatggcttcatcaccaagctgggcgatatggtcgggcgcgtgaaagcgggcaaagtggtgatgaccgcagacagcggcgaaaccgttttgccgccggttgccgtctatgcctcctcgttcatcaaccccgactgcaaaatcattgccgccaccagtcaaaaccgcgccctcgccttccccatcggcgaattgaaaattatggcgaaaggcaaagggctgcaaatcatcggattaaacgccggcgaatcgatgacgcataccgccgtttcttccgagctggaaatcctgattgaaagcgaaggcaggcgcggcgcggcgcacaaagaccgcatccccatctccctgcttgaggcaaaacgcggcaaaaaaggcagactattgcccatatcgggcagcctgaaacagctttcttcccctaaataaacccggttccgcacatattatggtgatttccaacccccgcgaacttgaaaaactcaaagaccggattcccaatctgatcaacatcatccgcgtcgccatcgtttttccgctgatgattatgcacatcctcgggctggaaaccggcagccgtgcgaacctgcacgcttcgtggacggcgtgggcgttttatgtttggctcgccattgcctgctggctgattttcttttccattatccatccgcattggcaatggcagtcgctgaaaatgccgcgtttcagcgcggtagcggacatcacgatgatcggcgtgctgacctacctgttcggcggcatcgattccggcttcggcatcctgatcctgcccttcgtcgtctgctcctgcctgctcagctacgggcgctaccccctgctctattccagctacgccgccatcctgctgatattcaacgccattgccgacggcgatatcggcaaatacccgctcatatcggatgcccgaaccgcctcggcaaccttcatccttgtcgccgcctcctatctttccgccatcttcacctcactgtcggtcaaatacatcgaccgtgccggaaaactcgcctacgacagccatatcgcctaccaccgcatcaaaggcttgagccaaaccgtactcgaacgcgttcaggaagctgtcgtcgtcatcaatgccgaagggctggcggtgctgttcaaccggaaggcgaaagaccttttccccgcgctcgaaatcggacggcgcgccggtctgtccgattctgccgccgaactgtgggatcaagcctctccgcacactttcgaatacgtcctcggcacacccggcctgaacgccggcatccgcgccgttccggtcaacaaagggtcggacaagctgctcatcctctacatccgcccgcaaagcgaaattcaggcagaagccctgtccgtcaaacttgccgcgctcggacaactgaccgccaacctcgcccacgaaatccgcaacccgatgtccgccatccgccacgccaacgacctgctgcgcgaaaatatggaagcgggggcggcagatccgttcaacgccaaattgtgcaaaatcatcgacggcaacatctgccgcatcgacaaaatgctcgaagacatttcctcgctcaacaagcgcaacaaaaccgaacgcgaaaccatcggcctgataccgttttgggaagaattcaaacaagagttcctgctcggccatcccgatgccgccgactgcatccgtccggacattcaaggcggcagcccgaccgcctatttcgatcccgcccacctgcggcaaattatgtggaacctcgccaacaacgcgtggcggcacagccgcaaacagcccggctcgatttccgtcaccatccgccccgcgcaaaaaaacaccgtctgtatcctctttgccgaccgcccgaagtgcaggaacacctgttcgaacccttttacaccacggcggaaaacggcaccggcctcgggctgtatgtcgcccgcgaactggcgcacgccaatttcggcgatttgacctacctaccggaagccaaatgtttcgaactcacattaccggaaaaaaccaatgactgaactgcaacaccccgtcctcgtcgtcgatgacgaaaccgacattctcgacctgatggaaatgaccctgatgaaaatgggcttgcgcgtccataccgcgtcaggcgttgccgaagccaaaaacaagctcgacagccaacgctattcgctcgtcctgaccgatatgcgtatgccggacggctcggggctggaagtcgtccaacacatcaacagccgcctgctcgatacgccggttgccgtcatcaccgccttcggcaacgccgatcaggcacaggaagcgttgcgttgcggcgcgttcgaccccgataccatgcagatacaggactatctcgaccaaatcgaacgcgacatcatcgaacaaaccctcaaacaaaccgaaggcaaccgcacgcaggccgccaaacgcttgggcatcagcttccgttccatgcgctaccgtatggaacgcctcaacatcggctgacgacaaaacggcatccgcaccatctccgcccacccgaaaaaatgccgtctgaaacggcacgggaaagcgggttcgccccacgcccgaacggacacaaaacaccatgaccgacatccttattgacaacaccgccaccgaaaccgtccgcaccctgatacgggcattcccccttgtgcccgtttcccaaccgcccgaacaaggcagttacctccttgccgaacacgataccgtcagcctcaggcttgtcggggaaaaaagcagcgtcatcgtcgattttgcctccggcgcggcacaataccggcgcacaaaaggcgggggcgaactcatcgccaaagccgtcaaccacaccgcgcaccccaccgtttgggacgcaaccgcaggattggggcgcgacagcttcgtcctcgcctcgctcgggctggccgttaccgccttcgagcaacatcccgccgtcgcctgcctgctttcagacggcatccgccgcgccctcctcaatcccgaaacgcaaaacaccgccgcgcacatcaacctccatttcggcaacgccgccgaacaaatgcccgcacttgtccaaacacaaggcaaacccgacatcgtctatctcgaccccatgtatcccgaacgccgcaaaagtgccgccgttaaaaaagaaatgacctacttccaccggctcgtcggcgaagcgcaagatgaagcggcactcctgcataccgcacgccaaacagcaaaaaaacgcgtcgtcgtcaaacgcccccgcctcggcgaacaccttgccggacaagaccctgcctaccaatacacaggcaaaagcacccgcttcgacgtttacctgccctacgggacggacaagggataacgcccataaaacaagacaccgaaaaatttgccgttcttatgcaaacgagaaaccggtttttgcgtttcgactgttttggataagtcatcacaccttaaagtttgtcattcccacagaagtgggaatccgattcattcagttttatagtggtttaaatttaaaccactatagttgttttcgagtttcaggcaacttccaaaccgtcattcccacggaagtgggaatctagaaatgaaaggcaacaggaatttatcgtaaatgactgaaaccgaacggactagattcccgcctacgcgggaatgacggggcgggcagatgccgtctgaaattccgtcattcccgtgaaaacgggaatctagaacttctgatttttcagacgacttttgaacattgccgccacccaatgatctggattcccacctgcgcgggaatgacgaggtttcaggttgctgtttttaagttgctgtttcgggttgctgttttttatggaaatgacaaggttttagattgcgagaatttatccgctcctccgtcattcccacggaagtgggaatccagaaatgaaaagcaacaggaatttatcataaatgaccgaaaccgaacggactagatttccgactgcgcgggaatgacggggcgggaggatgccgtctgaaattccgtcattcccgtgaaaacgggaatctagaacttctgatttttcagacgacttttgaacattgccgctacccaatgatttggattcccgcctgcgcgggaatgacgatgtaaaattatccgggattcaaaaagacaggctttcacatccgtgggaatgactgcggaaagatgatttttatagtggattaacaaaaatcaggacaaggcgacgaagccgcagacagtacaaatagtacggcaaggcgaggcaacgccgtactggtttttgttaatccactatattttgtcataaaaatccgcaccttaatcagttggcggttaaatcaaacttttagggtgcagattactttttatgatttcagacagcattttgacaggcggcagcctatttcggcaataccaaaaacttaatcagcagttctttgaatacaaaaccgaacacgcccaagcccaaaaccaaaaacaaaatggcgatgccgaatttgcctgctttggactccttgcccaaattccaaacgataaaacccaaaaaaataatcaagccggtcaggcagattttcaacgcccaatcggcaaaaaccgcttcatccatatttttttcctattgttgatgtgtatgccatataagataagggtttcagacggcatctgctgtccaatgccgtctgaaacacgcaatcagcgtgcgagtgcctgtttcaaatcgtcaatcaaatcgccaacatattccaaaccgaccgacaggcgcaccaatccggggcggatgttggcggcgagtttttcttcgggctgcatcctgccgtgcgtggttgtccacgggtgggtaatggtcgagcgcacgtcaccgaggttggcggtgcgggaaaagagttccacgccgtccacaactttccacgccgcttcttgatcggcaacttcaaagccgatgacgatgccgccgccgttttgctgtttgcggataagcgccgcctgaggatggtcggacaatccggtgtagtacacggcttgaacctgcggctgcgcttgcagccattgtgcgattttcagggcgttgtcgaactgtttttccatacgcagcgacagggtttccacgccgctcaacaactgccacgcattaaacggcgacatcgccagcccgcaagagttgcaatacatggcgacctgcgccaacaactcttccgaacccgccaacacgccgcccatcacacgcccgtgtccgtctatggctttggtcgcggaggaaacggaaatatccgcaccgtgtttcaaaggctgcgagccgacgggcgacagcaggctgttgtccaccaccaagagcgcgccgatgccgtgcgccaattccgccaaggcttccaagtcggccacttcgcctaaggggttggacggcgtttccaaaaacagcagtttggtattggctttgacggcggctttccattcgtttatatcagtcggcgacacgtggctcacttcgatgccgaatttggcaacgatgttattgataaagccgacggtcgtgccgaacaggctgcggctggaaatcacatggtcgcccgcctgcaaaaaggtgaaaaacgccgcctgaatcgcagacatacccgccgaagtggcgaccgcgcgttccgcaccttccaaagcggcgatgcgtttttcaaaggcggctgtggtcgggttggcggtacgggtataagtgaaccctttgattttttttgaaaacaaatcggcagcgtgttgggcgttgtcccacatgaagctgctggtcagaaacaatgcctgattgtgttcgcggtattcggtttgttctttgccgccgcgtatggcgagcgtttgcggatggagttttttgctcatcggtgattcctcggttttgtccgttcggcaacggagcgtgcgcccgttgtttaatttgttaatattttgcgcctgttctatgatgctttcaagtcggatgagaatgcaaatgccgtctgaaacggctttcagacggcatggcaatcagcgtttgtattttaactcgtacttgatgtcgttgaggattttgcggacatcgtgttccaacacgtcttcgactaccgcccccgcctgctcgtgcagcatctgctggagctgataggtgaaaaccgccatctgcttttgcaccgccgttcggatgatgccgttgacggtatcggtcagatgcgggcgcaggcgtttgatcagccgttcggtcagctcctgttcggacaggcagaacacttcgcgccggttgacggctttcgggttcaggatattgatttggacgggcatcaacgtttcttccgcatcgttttccccgttttccgaaaccgccggctcattcgtgccggattctgcctcgtcggcgttttccccgctttcaatctgtccggtttcaaattcgacactgtcttttttggtatcaaaccggattctccgccgcgattcgatgtgtttttccgaaaccgacatttgcagggaagcctgcgcgttgagccagttttcctgaaggacgatcatcgggtcggtttcgacttcctcgccgcaatcggcaacggcggcattgtgttcctcctgccattttttcagatacgccttcaacacacgggctcggctctcatcgtccagtttcggcacaggcgcgtccgttccggtttcagaggggcgggacagcggcgcgtaagtcggcactgccttcatacggcgcgtctgacgcaggttttccaaacgtttttcccaattcggctctttattcgcatccattttcggcttccggttcttaatctttgcaagcagacaaacccgcgcccaaagcgcggtttgatataatggcgcattttaacagattcgcgaggatacatcatgggcagcatcgaacagcgtttggaatatctggaagaggcgaacgacgtgctgcgtatgcagaaccacgtcctgtccaccgcattcaaagccttaatccgcgcccttcccgccgaaaccgccgaaatcgcggtcgagtcgattcagcttgcttttgaggacgccttggcagaattgagctatgaggacagcccgcatacggatttgttccacgacgttacttatgcgtttttccgtgaaaaagaacgttaattttatgttaaactgattttttaggctttttgattaccgaaaggaattttgatgaatatgaaaaaatggattgccgccgcccttgcctgttccgcgctcgcgctgtctgcctgcggcggtcagggcaaagataccgccgcgcctgccgccaaccccgacaaagtgtaccgcgtggcttccaacgccgagtttgccccctttgaatctttagactcgaaaggcaatgtcgaaggtttcgatgtggatttgatgaacgcgatggcgaaggcgggcaattttaaaatcgaattcaaacaccagccgtgggacagccttttccccgccttaaacaacggcgatgcggacgttgtgatgtcgggcgtaaccattaccgacgaccgcaaacagtctatggacttcagcgacccgtattttgaaatcacccaagtcgtcctcgttccgaaaggcaaaaaagtatcttcttccgaagatttgaaaaacatgaacaaagtcggcgtggtaaccggctacacgggcgatttctccgtatccaaactcttgggcaacgacaatccgaaaatcgcgcgctttgaaaacgttcccctgattatcaaagaactggaaaacggcggcttggattccgtggtcagcgacagcgcggtcatcgccaattatgtgaaaaacaatccggccaaagggatggacttcgttaccctgcccgacttcaccaccgaacactacggcatcgcggtacgcaaaggcgacgaagcaaccgtcaaaatgctgaacgatgcgttggaaaaagtacgcgaaagcggcgaatacgacaagatttacgccaaatattttgcaaaagaagacggacaggccgcaaaataagcccgcccgtccgaacacaatgccgtctgaagccctttcagacggcattgttcatcaatcggcctacaatgaactgcctgctgatttctccctaccgcaaagcaacaggcaaagattacaaatatcaaaatccgagtaaaacagtattttattaaaacaaattgataatcaagagattagaattatgtattgtctttaccgtacaaacgctggcactatttcaacctgataaaaaacagccttcaaaaaggttgtttaaaacagcagcagacacttaccgccacaaccttgaaaaggaacacaatcatgaccgtcatcaaacaggaagactttatccaaagcatttgcgatgccttccaattcatcagctactatcatcccaaagactacatcgacgcgctttataaggcgtggcagaaggaagaaaatcctgccgccaaagacgcgatgacgcagattttggtcaacagccgtatgtgtgcggaaaacaaccgccccatctgccaagacacaggtatcgcaaccgtcttcctcaaagtcggtatgaacgtccaatgggatgcggacatgagcgtggaagagatggttaacgaaggcgtacgccgcgcctacacttgggaaggcaatacgctgcgcgcttccgtcctcgccgatccggccggcaaacgccaaaacaccaaagacaacacccccgccgtcatccatatgagcatcgtgccgggcggtaaagtcgaagtaacctgcgcggcaaaaggcggcggctctgaaaacaaatccaaactcgccatgctcaatccttccgacaacatcgtcgattgggtattgaaaaccatcccgaccatgggcgcgggctggtgtcctcccggcatcttgggtatcggcatcggcggcacgcccgaaaaagccgtgctgatggcaaaagagtccctgatgagccacatcgacattcaagaattgcaggaaaaggccgcgtccggcgcggaattgtccaccaccgaagccctgcgcctcgaactctttgaaaaagtcaacgcgctgggcatcggcgcacaaggcttgggcggactgaccaccgtgttggacgtgaaaatcctcgattatccgacccacgccgcctccaaaccgattgccatgattccgaactgcgccgccacccgccacgtcgaatttgaattggacggctcaggccctgtcgaactcacgccgccgcgcgtcgaagactggcccgatttgacttacagccccgacaacggcaaacgcgtcgatgtcgacaagctgaccaaagaagaagtggcaagctggaaaaccggcgacgtattgctgttgaacggcaaaatcctcaccggccgcgatgccgcacacaaacgcctcgtcgatatgctcaacaaaggcgaagaattgcccgtcgatttcaccaaccgcctgatttactacgtcggccccgtcgatccggtcggcgatgaagtcgtcggtccggcaggtccgaccacagccacccgcatggacaaattcacccgccaaatgctcgaacaaaccgacctcttgggcatgatcggcaaatccgagcgcggcgtggccacctgcgaagccatcgccgacaacaaagccgtgtacctcatggcagtcggcggcgcggcgtatctcgtggcaaaagccatcaaatcttccaaagtcttggcgttccccgaattgggcatggaagccatttacgaatttgaagtcaaagacatgcccgtaaccgtcgccgtagatagcaaaggcgaatccatccacgccaccgccccgcgcaaatggcaggcgaaaatcggcatcatccccgtcgaatcttgaggcgccatgccgtctgaacacaaaatctgccttcagacggcatttccgcccccggttgcggtacaatccaccatttcatcactcggcgacccacaccgtgaaaatcctcattttaggcaacggacaggtaggttctaccgtcgcacaaaaccttgccgccatacccaacaacgacgtaaccgttatcgacatcgacgaaaaagcattgcaggaaacaggcagccgcctcgatgtccaaaccgttttcggcaacggcgcatcccccttcacattagaacgcgccggcgcggaagatgccgacttgctgctcgcgctctcccgcagcgacgaaaccaacatcgtcgcctgcaaagttgccgccgacctgttcaacatccccggccgcatcgcgcgcgtccgttccagcgaatacctcgaatacctcagccccaagctcgaaaacaacgaaaacggcagcctttccatattcggcataaccgaaaccatcagccccgaacagctcgttaccgaacagcttgccggcctgatagactgcccgggcgcattgcaggttttacgttttgcagacgaccgcgtgcggatggtcatcatacaggcgcggcgcggcggactgcttgtcggacgcagcattgccgacatcgcccaagatttgcccgacggggccgactgccaaatctgcgccgtttaccgcaacaaccgcctcatcgtccccgcgccgcaaaccgtcatcatcgaaggcgacgaaatcctatttgccgccgccgccgaaaacatcggcgcggtcatacccgaattgcgccccaaagaaaccagcacccgccgcatcatgattgccggcggcggcaacatcggctaccgtctcgccaagcagctcgaacacgcatacaacgtcaaaatcatcgaatgccggccgcgccgtgccgaatggatagccgaaaacctcgacaacaccctcgtcctgcaaggttcggcaaccgacgaaaccctgctcgacaacgaatacatcgacgaaatcgacgtattctgcgccctgaccaacgacgacgaaagcaacattatgtccgcccttttggcgaaaaacctcggcgcgaagcgcgtcatcggcatcgtcaaccgctcaagctacgtcgatttgctcgaaggcaacaaaatcgacatcgtcgtctccccccacctcatcaccatcggctcgatactcgcccacatccggcgcggcgacatcgttgccgtccaccccatccggcgcggcacggcggaagccatcgaagtcgtcgcacacggcgacaaaaaaacttccgccatcatcggcaggcgcatcagcggcatcaaatggcccgaaggctgccacattgccgccgtcgtccgcgccggaaccggcgaaaccattatgggacaccataccgaaaccgtcatccaagacggcgaccacatcatctttttcgtctcgcgccggcgcatcctgaacgaactggaaaaactcatccaggtcaaaatgggctttttcggataaaccgccccattccggacatattgccgccaagcggtatggaagcggaaataatggtaggtgggcttcagacggcatccgccctccccgtcattcccgcgtaagcgggcatccagaccttgggatagcggcaatattcaaaggttataaaagacccgtcattcccgcgcaggcgggaatccagaccttgggatagcggcaatattcaaaggttatctgaaaatttagaggttctagattcccgctttcgcgggaatgacgaaaagttgcgggaatccagaacgtcgggcaacggcaatattcaaaagccgtctgaaaatttaaaagttctagattcccgctttcgcgggaatgacgaagtttcagacggcatcgcccgcctgttttgatatagcggcacccccccgacaaaaaaacaatccggaacgcatctgaccgttccggcttgttttcaggcgaatccgccgcatcagaacatactgcgcacgcccatattgacctgccaagtctagcgcatcgtgtgcatcgaagacctttgcgcctcaaaataaagctgccttccgttgtcggcattaccacgcaaaaaaatgaattgcttgatattccaatgttttttatatgtttttatattgtgatgcgatcagacaaacgcccccctgacatttgtttagacggcatcgtattgctaaatttctataagtatgtataatgtccgtttccacgcgcccatcgtctagaggcctaggacactgccctttcacggcggcaaccggggttcgaatccccgtgggcgtgccaattcaaaaacctgcttgtttcaagcaggttttttattatgagtcgtcattcccgcaatttttcgtcattcccgcaaaagcgggaatctagagcgtagggttgaagaaaccgttttatccgataagtttccgtgccgacaggtctggattcccgcctgcgcgggaaggacggcagagggtggacgatgccgtctgaagcctgacaaagcatttgatgccgtctgaaacttcgtcattcccgcaaaagcgggaatctagagcgtagggttgaagaaaccgttttatccgataagtttccgtgccgacaggtctggattcccgctttcgtaggaatgacggaattttaggtttctgtttttgtggaaatgacgaataaagcgtgccggtttatgctcgccgcaacacgcggttcagacggcattgctctcttttttcattatcagtgggtgtagcaactgtatttttcaccccgtcgggcaaaaatacagttgctacgatgcaccccgccgccctgccctgtgccttgtcctgcaatacggcatataatgcaccacaaacccccgcgctgcggttttcagacggcatcgccgtgcttttttacaggcattagccctttttatcggacgcaatattaaggaggaacaaatgaaaagctcttttgtgcaaacgcttaccatcgccggttcggattcgggcggcggtgcgggcattcaggcggatttgaaaacatttcagatgcgcggcgtgttcggaacgtgcgtcatcaccgccgttaccgcgcaaaataccttgggcgtgtcggcggttcatctcgtcccgaccgaaaccatcaccgcacaaatccaagcaatcagggaagacttcgacatccgcgcctacaaaatcggtatgctcggcacggcggaaatcatcgaatgcgttgccgacaagctgaaacactgcagctttggcaggcgcgtactcgaccctgtgatgattgccaaaggcggtgcgccgctgttgcaggattccgccgttgcggcactgacgcgcctgctgcttcccgatacggatgtattgacccccaacctgcccgaagcggaagctctgaccggcgtgcatattgaaaaccgtaaagatgcggaacgtgcggcaaaaatcctgcttgattacggtgtcaaaaatgtcgttatcaaaggcggacatttgaacggcagcacaagcggacgctgcacggattggctgtttacacaaaatgaaacgctggaattcgacagcccgcgctttccgaccgcccacacgcacggcacgggctgcacgttttccgcctgcatcaccgccgagttggcaaaaggctcggacgtttgcgaagccgtacagactgccaaggcctacatcacggcggcaatctcaaaccctttggaaatcggcgcaggacacggcccggtcaatcattgggcgtatcgggactaaccgtaaaaatgccgtctgaaacaaaatgttcagacggcatttttgaggattattcaggctttttcgccagcatcgttacaaatttaaaccgtatcggattgccgttttcgtctttggcatgcatagaacccaattcttctttatattcgaccagttcccaatcccgataataatccttcagctcgccctctttaaatttaaaagggaacggcatcggacaggggaaatccgccgtatccattgccgatacaatcaagttgtacccgcccgccgccgtatgcgcctgcatatcggcaatcacgtcgggtacgcgctgcggcatcaggaacatcagcaccactgttgccacaatataatcaaactcgccctgcaaggcggcggcgttcaaatcatattccagcgtgcggacgttcaaaccctccgcctctgccagctccgccacgtttgccaaggcggcgggattgtgatcgactgcagtaacttcaaaccccttcaaaccgagaaacagcgcgttgcgcccctgtccgcagcccatatccaacgccctgcccgccggtacggtatcccgtgccgccgcgaccgcagaatgcgtggcactcatcccgtattttttgtgaaaatagtctgccgccgcgcaatacagcgacaaacggatttcggcatcgtccgttttcggtttgacagaaaacacctgctgcggcgcaaacacacaatcgccgccgtctgccgaccaaacttctgccgacccgtccggtgcacgaacttcgacatcgccctgcaacacattcaggcagacccactccccttcctcagacgaatagcccgacaacaaaacttccggcaggttttccactttccatacaggcatctgtccgaaacaaaacaactcgccactttgacccactatccgctccttcatattcaaaaataaagttgcacattatatgcctattttaatccgccgcaatctttcagacggcacggcgcgcaaaccgcttataatcacgccggacaccacacaaaggcacaataatgaaccaaaccgtttacctttacaccgacggcgcgtgcaaaggcaatcccggcgcgggcggctggggcgtgttaatgcgctacggtagccacgaaaaagaacttttcggcggcgaagcgcaaaccaccaacaaccgcatggaactgactgccgtcatcgaaggactgaaatcgctcaaacgccgctgcaccgtcatcatctgcaccgactcgcaatacgtcaaaaatggcatggaaaactggatacacggttggaagcgcaacggctggaaaaccgcctccaaacagcccgtcaaaaacgacgacttgtggaaagaactcgacgctctagtcggacggcatcaagtcagttggacttgggtgaaaggacacgcgggacacgccgaaaacgaacgcgccgacgatttggcaaaccgtggcgcagcgcagttttcctgactgccgctccggcaaaaatgccgtctgaaaccgctaatgggcttcagacggcatcgtcctccaccgtcattcccgcgcaagcgggaatccaaaccgtcgggcaacggcaatattcaaagattatctgaaagtttgaagttctagattcccgttttcacgggaatgacgaaaagttgcaagaatgacggagtttcaggcggcatccgaccgccccgtcattcccgcgaaagcgggaatctaaaaacccaacgctgcaagatttatcagaaacaactgaaaccgaacggactggattcccgcctgcgcgggaatgacgggattttagtaaccgtagcaaccgcctgcgcgacggctaaggggcttcagcaaccgtagcaactgcctgtgtgggaatgacggacaatgggcttcagacggcatctcttgcctgccgctaaaacagtttgccgcacaactgttcaaacgcgtccgatatgtttcaacacacaggacgacacataaagcacctccctatgtgtcgtcctgatttggaaggggttacaccccctcccaaataaagtctgatcctgccgccctaaagggcggggtttcaaccgaaaaggaaatacgatgaagtggtacaattagcggcaatgcggacagacaaattaaactatagtggattaaatttaaaccagtacggcgttgcctcgccttagctcaaagagaacgattctctaaggtgctgaagcaccaagtgaatcggttctgtactatttgtactgtctgcggcttcgttgccttgtcctgatttttgttaatccgctatatcagaaattaccctaccgttttttaaacactttcaggaataaggaaaaatgaccgcccaaccctgccccatctgcacggcgcaaaatgaagacgttttgctgcaaacccccaacctccgcgtcatcgccgtccataacgacagcggttcgcctgcattctgccgcgtcatttggcgtaagcatattgccgaaatgaccgacctttcggcagcggaacgcggcgaattgatggaaatggtgtacaaagtcgaagccgctatgcgccaagtgttccggccggcaaaaatcaacctcgccagcttgggcaatgtcgtgccgcacctgcattggcatattatcgcccgctttgaaaacgatgcgtctttccccgcgccgatttgggcaaaccccgtccggaaacacggtatgaccctgccgcaagattggacggaacagcttaaaaagctgctttaagcccgccgatgccgtctgaaaccgtatgaaagggaaattatgaccgaaccgacctcccgccgccgttttctgaaaacctgcaccgccgctgccggcgcggggctgcttcaggcttgcggcacatccgccacatccgttccgccccttccctcttcccattccgttgtgaaagcccgaaccgtgcctctccaaacgccacgccgtcaaagttcggacggcaaccttctgcgcgttgtcgcttcgtcaggatttgccgaagacaccaaccgcgtcaacacagccttaacccgcctttacaatgtcggttttaccgtaaccaaccaacaggcgggcagccgccgtttccaacggtttgccggcacggacacgcaacgtgccgccgatttccaagaggtcgcttccggccgcgtcgccacgcctaaagtgctgatgggtttgcgcggcggttacggtgcggcgcggattctgccgcatatcgattttgcttcgctcggcgcaaggatgcgcgaacacggcacgctctttttcggattcagcgacgtatgcgccgtccagctggcattgttggcaaaaggcaatatgatgagttttgccggcccgatggcttatagcgattttggcaaacccgcccccggtgcgtttacgatggatgcctttatcaagggtgcaacccaaaaccgcctgaccgttgatgttccttatatccaacgcgccgatgtcgaaaccgaaggcatattgtggggcggcaacttaagcgtcctcgcctcgctcgccggcacgccttatatgcccgacatcgacggcggcattttgttcctcgaagatgtcggcgaacagccctaccgcatcgaacgtatgctcaatacgctgtatctttcgggtattttgaagaaacagcgcgccatcgtgttcggcaatttccgtatggaaaaaattcgagatgtctatgatccgtcttatgatttttctgccgttgccaaccatgtttcgcgcacggcgaaaatccccgtgctgacgggcttcccgttcggacacattgccgacaaaatcactttccctctaggcgcgcacgcccgaatccgtatgaacggaaacagcggttattcggtcgcgtttgaaggctaccccacactcgatgcgtccgccctgactttggataccctgctcccaccgccggatttgcccatcttccccgaaagcggtgttgccgatatttcggaataaacccgcaaacggacaaatgccgtctgaagccttcagacggcatttcccaagacggcggcagattacagcaatgcccgaatatcggcttcgatttcttcgggcgtaacactaggcgcaaaacgctcgaccacttcgccgtcgcggttgacgaggaatttggtaaagttccatttgatgtcgccttcgtcgcgcttctctcccaaagctgcgagcttcaacacgaaatctttaaacagatgattgcctttatcttgcggtttgacggatttcaggtaggcatacaagggcgcggtatttgctccattgacttcgattttgtcgaaaatcttaaacttcgtgccaaacttcatcatacacacttgggcaatttctccgctgctttcgggagcctgttcgcggaactggttgcacggaaaatccaaaatctccaagccttctgcggtatattgtgcatacagcttctgcaaagcctcgtattgcggggtcagaccgcaacgcgttgccgtgttgacaatcagcagaaccttgccgcgatagcctgacaaatcaaccgcattgccttctgcatctttcatttgaaaatcgtaaatacccatttttatccttatctgatgtaaaccgatgccatctgaaacgtgcttcagacggcatgaaagcagcaattgtatagccgattaaaataaaaaatccacatccttttccattcccgtcccaatccgcaataaaaaactgcacccgaaaacgggtgcagttgctcatttcataccgcaaaacttatttgtcgcggccgaatacgattttagtggcttggatggcgacacagattgcaccgccgataaagaccaagtcagctgccgtacgtacccaacgcaaggtatcgaggatttccatttgcaggaactcttcgctgcgggcataccacagaccgtgcgtgatggaggcgtatgcctgaatcgcgccgacaggcagcaggctgatggcaatcataccggccaagccgccgttgagcagccagaagccccaagtcatcagtttgtcgtcaaactgcgcgttcggtttcaaataacgggcaaccagcaatacgaagcccaatgccaagaaaccgtacacaccaaacaaggcggcgtgcgcgtgaacggcagaagtgttcaaaccttggatatagaacagggaaatcggcggattgatcaggaagccgaatacgccggcaccgatcatattccaaaaggcgactgccacgaagcacatcagcggccaacgcaggcgtttcgcccagtcggacaggtgttggtaagaccagtgttcgtatgcttcacggcccagcaacaccagcggcacgacttccaaagcggagaagcaggcaccgattgccatagaggcggaggtagagccggagaagtacaggtggtgcagcgtgcccggaacgccgcccaacataaagatggcggcagcggccaaagtggaggcagtggcggtactgcggcggacaaagcccatattgtagaagacaaaggcaaaggcggcagtggcaaatacttcgaagaagccttctacccacaggtgaaccacccaccaacgccagtattccataacggcaatcggggatttttcgccatagaacaggcctggtgcgtagaatacgcccacaccgaccatagaagctacgaagatagccaacaggtttttgtccacgcctttttctttaaaggcggaaaccgtgcaacgcaacatcaggaacagccataacagcagaccgaccatcaaaaggagttgccagaaacgtcccaaatcgaggtattcgtaaccttggtgtccgaaccagaagttaaattccgggggaaggatgtgcgtcaacgcgaagaagttgcccgcgtaagaaccgccgaccacgatgaagagggcgatatagaggaagtttacgccggcacgttggaacttgggatctttaccgccgttgacaatcggcgcgaggaacaaacctgccgtcaaaaagccggttgcaatccagaagatggcggattggatgtgccaagtacgggtcagggcgtaggggaaccagtcggacatttcaaagcccaacgcctcgtcaatgccgtagaaaccctggccttcgacggtgtagtgcgcggtcagtccgcccagcaatacttgtaccacaaacagggcgaccgtcaggaagacgtatttgcccaatgctttttgcgaaggggtcagttggattttggaaatcgggtcttcagacggcacttccacttcctcgtgtttggtcaggaaggaataaccccacatcagcaaaccgatgcccatcagcagaagaacaacgctggtgaatgaccacatatagttttcagtggtcggtacgttgttgatcaaaggttcgtgcggccagttgttggtgtaagtaaaattctcgtcaggacggttggtcgaagcagaccaagaagtccagaagaagaagttgaacagtttttcacgcgcttcttggcttggcaatgtattgtttttcattgcaaagtgttcgcgagtggtttggaacttaggatcgtcgctgtacacaccgtggtagtaaggcaggatgctttcgatggctttcacgcgcgtatcgctgatgacgacgctgccgtcttccttcacgcggctttgattgcggtattcgtcggccaggcgtgttttcaagacggcttgttcctcgggggaaacctcgtcgaattttttgccgtaagtctgttgcgcggtcaaatccaaccaggcaaccaactcacgatgcagccagtccgccgtccagtccggagcctgatatgcaccgtgacccaaaatcgaaccgacttccataccgccggtagtctgccatgcagactgacctgccaaaatatcgtctttcgtcatcaagaccttgccggatgcggaaacgacctgttcggggtaaggcggggcttttttgtaaacctcgctgcccatatagccaagaatggtaaagcataccgccagaacggcaaacagcaagtaccaaagcttcttgtactgtcccattttgagagctccttttaatatagtggattaaaattcacaaaatatgaatgttaaagattgtagcacggtttaccgcgcaaataaacatttgttcaaagaaactcacatataaaacaaatacatatatgataataactatcattattctttagtcggcaactaccctgcctttgcctgatttgccgaagcccttaagcaaatcagcctatttattgtaatttttagtagctataaagtattagaagtatcattttaagttcatattttatgaattatttgacttaaatcaaaatgcccccaatggggcaaacgcataatcacaccaagttcttaaccaatccctctacttttcttacaaaaggaaaatattatgaaacgccaagccttagctgcaatgattgcttccttattcgcattagccgcctgcggcggcgaacctgccgcgcaagcccctgccgaaacccctgccgctgccgccgaagccgcaagctccgccgcacaaaccgccgccgaaacaccgtccggcgaactgcccgttatcgatgcggttaccacccacgctcccgaagtgcctcctgcaatcgaccgcgactaccccgccaaagtccgcgtaaaaatggaaaccgtcgaaaaaaccatgaccatggaagacggtgtggaataccgctactggacatttgacggcgacgttccgggccgtatgatccgcgtacgcgaaggcgatacggttgaagtggaattttccaacaatccttcttctaccgttccgcacaacgtcgacttccacgcggctaccggccagggcggcggcgcggccgcaacctttaccgctccgggccgtacttccacattcagcttcaaagccctgcaaccgggtctgtacatctaccactgcgccgtcgcaccggtcggtatgcacatcgccaacggtatgtacggtctgattttggtcgagcctaaagaaggcctgccgaaagtggataaagagttctacatcgtccaaggcgacttctacaccaaaggcaaaaaaggcgcgcaaggtctgcaaccgttcgatatggacaaagccgttgccgaacagcctgaatacgtcgtattcaacggtcacgtaggtgctatcgccggcgataacgcgctgaaagccaaagcaggcgaaactgtacgtatgtacgttggtaacggcggtccgaacttggtatcttccttccacgtcatcggcgaaatcttcgacaaagtttatgttgaaggcggcaaactgattaacgaaaacgtacaaagcaccatcgttcctgccggcggctctgccatcgtcgaattcaaagtcgacatcccgggcagctacactttggttgaccactctatcttccgcgcattcaacaaaggcgcactgggtcaattgaaagtagaaggtgcagaaaaccctgaaatcatgactcaaaaattgagtgataccgcttacgccggtaacggtgcagctcctgctgcttccgctcccgcagcttctgccccggcagcctctgcatccgaaaaaagcgtttattaaattggatacccgtcattagcgggacgaaccactgccgctgtacttcattacgcacggcggtggttttttaacaaccaatctttcctttcggaagattgattttaaccgcctgtcaggaggctttatgaagtatgtccggttatttttcctcggcgcggcactcgccggcactcaagcggcggctgccgaaatggttcaaatcgaaggcggcagctaccgcccgctttatctgaaaaaagataccggcctgattaaagtcaaaccgttcaaactggataaatatcccgttaccaatgccgagtttgccgaatttgtcaacagccacccccaatggcaaaaaggcaggatcggttccaaacaggcagaacccgcttacctgaagcattggatgaaaaacggcagccgcagctatgcgccgaaggcgggcgaattaaaacaaccggtaaccaatgtttcctggtttgccgccaacgcctattgcgccgcacaaggcaaacgcctgccgaccattgacgaatgggaatttgccggacttgcttccgccacgcagaaaaacggctcaaacgaacccggctacaaccgcactattctcgattggtatgccgacggcggacggaaaggcctgcacgatgtcggcaaaggccgcccgaactactggggcgtttatgatatgcacgggctgatttgggaatggacggaagatttcaacagcagcctgctttcttccggcaatgccaacgcgcaaatgttttgcagcggcgcgtctatcgggtcgagcgactcgtccaactatgccgccttcctccgctacggcatccgtaccagcctgcaatccaaatatgtcttgcacaacttgggcttccgttgcacaagccgataaccccttcaattatagtggattaacaaaaaccagtacggcgttgcctcgccttgccgtactggtttttgttaatccactatattccgccatctctaagatttacagcgatacacgggtaatttaaggaatgcccgaaccgtcattcccgccactttccgtcattcccgccactttccgtcattcccgccactttccgtcattcccgcaacttttcgtcattcccacgaacctacatcccgtcattcccacgaaagcgggaatccagtccgttcagtttcggtcatttccgataaattcctgctgcttttcatttctagattcccactttcgtgggaatgacggcggaagggttttggttttttccgataaattcttgaggcattgaaattctagattcccgcctgcgcgggaatgacgattcataagtttcccgaaattccaacataaccgaaacctgacaataaccgcagcaactgaaacgtcattcccaccacttttcgtcattcccaccacttttcgtcattcccacaaggacagaaaaccaaaatcagaaacctaaaatcccgtcattcccgcgcagatgatatgttgcccgtcaacacaaaataaaaaacaaagttgcaatatactgatttatattgttatttttatttacgtttatttacgatatgcaaatgcacggttacacaaatatattcgcgtaaccgtttaattttgttgaattttattgattcaatcggtgtctttccgcatcgtaaggctggccggttttaacaatgtaataggcgagcttcgccagtttgcgcatgatggcaacgatgattaccatctttggcttacccgcttttttcagattatttattaatttcggaaatgcgttaaaacggtaagcacaaagggcgggcatatacagcgtactttttaatcgtctgtttccgtatcggctcaatctgccccgacctcttacgcttgtccctgattgtatgatggcgggatttaatccggcataggatacaaactggtttgcggttttaaaatgtttttctgtcagttgcgcataaagaactgatgcggtgtctttgcctatgctcgggatggtttgaagattgcggtaatggttattgtccgtttgttttttgatttgttcggatatggctatttttacctgttccatcttgtcctgtatggtatctatcaagtcttgatgtatgttccttatgaagtcttcttcagtgctatgaagacggtttttaatttgcttctgatgttgatgtaattgatttttaaggttaatcagtttttgcagtgctttgtttttgggtatctgatacggtatcaatgtatcttgatgcctttttatgtagtctgctatcaggtttgaatctgctttgtcggttttggtacggttaaacctgctttttccgtagtccttgatttttaagggattaataacgtaaacagtatagtaggaagaaagcatatctgctgccttttcgtaatagatgcctgttgcctccatgccgatatagacttttctgattctgtttccctttatccacaatctaaactgttttaatccatcatcattattcttaaatttaatgtaatggatacttccgtttgttttatgcaatgttgcgtctatggtgtcctttgagatgtccagcccgattatattcattggtattttccttatttatacagccttgatacggctaggatgatattcaatttcgaggatggataaaggcagccggcatttctacgcgtctgttttaatacattgcgggatttgctgcctgactgccttagcccttgctttgcgcgaaacaaagacccgtaaaccgtctatattcaaacggtttacgggtcttttttctctcttgccgttttcttcagtttgccgatccgaccacgcccccgccgattccttcaaacggtttcccgcgttcttcccaattatcgtacattaggttctgctacggttttccgcccaatgtggcaacttgcgccctgtccgaatgttgctgcgcgctttgctgaacttcctgcccttggctttcttctttgtatgggttaaacggcaagccgttttttacatagtccttgcacatcaactccgtcacttctttcaatgccgtcccttgatgcgaatagcaggcgcatccggttcttccgccttctatacagcctgctatatattcaaaggttcttacctgccttacaccgttataaatcggcttgctttcgggtttttcggacaatgtcggaacaaacatatctgcggtaaggttgccgttatttaccggctcgccttctgttttatccggaagtactgcctgctgttctgttgccgccgattcttgtgctgcgggttcttcctgtttttttccgtaactgctcaacattttataggacaggccgacaaacacgggaatcagcaatactattactggcagagtgtaaaaccactttgaccgcttgaccttatttacggtatgaacttccgctgattcgtacaagtcataaacttttttatccagtgtatagatactggagaatgcgcttgatgccatttttacgggatcgtccgcgcatattttccattctaaaagcgtacgcatacccatcttgtttgaagcgatgtggtaatgtttccgtacaagcgttctaagattttgatctagaagcttaggaccttgagtcaaaacaaatatatcaatgccctgatgtctgtgcgtattcagccattggacattttcagggatttttgaacctgccgagcgtgccggccatacgtcttgagcttcatctacaatgacaatagacccgatattttcgggcttctttatccattcgtacatatcatgcgccgaaagctgctcatctgtcgatttcggcagcttttttgcgtccgtttctatgtaggtgtgcggtattttcaagccttttatgttcgtaaatactttacggcgtatgccgttttcatcaggcttaaacatttcatcattcgccatcatggaaaccatttttaatgttttccctgaaccgggcgtgccggttatcaaacagatctctgccatttattttttcttcccgattgaggttgctagttttgtcatttgtttgaatgacagaataaaggcgatcgcgccaaacaggatattaagaacggttccaccgccgcttatataaaaaagctgcaacatcgcttgaggcgcgcccgttatgctattggttatcgcctgctgaaaatgggctaccaatctatccacccctgaataggttaccgccatcaagcctaatgcagtcaatatacggcctgccacgctcatcaaaagcggaatcaatgcggccaacaatttcatttgctatccctttcttaaaaggcacggttgcctcattaaacaaatgtttcttaatctgaaagattttgcgccgcattcgcggcgcggcggcgctgtggggacacccccctcgcgcttatcgccaatccccccgcgcttctcggctatttgcgacattcgtcgcaaagtgcgctgcttcgcctgcctttcggccaaagtttccgaagctgaacgctttgcgggggactagtcccccacaccccctagtctcacttgcgacgccgcgggggcatggggacggcgcaaaaggcgcgcgccttaccacctgcccttgcggcagaatgtgttcttttggcggggcggcaaggggtatccaaaaagatttataaagacgataaagccgtctttacaaatctttctggacgtcctccccctgccttggtacaagttactgaagcccggcggtgctgcgcctgctagacttcacgagatactgtgcggatacaaaaaaaggcggcaaccgcccaagcaagggcgagaagcatgtaccttagccgttcggctatggtacatgcgttctcaaagctgaacgcgaactgcctgcttgaatcaagcacagtcactgtgaaagtgacaggtgcgggacactgtgcggaatcttgaaagattcctgatttctgaaactctacattgacggtttcagacggcagatttaaatcttctgccggattggactcgggcagcctgtcgcaagcgagaatgtcggggaagaatttgcacaaaaggccgccatctttgccgtcctttccgtctttgccgtccctgccgtttgtgcgtcccggaacggcgggggaatcgggtcttgtgccgggctgtccgtccgtatcgggatttgcatcgggattcaaatcggggtcgggttcgggattggggctcgtgccggggttctcattggggttcgggttgtttgcggggttttcggcgggcgatacttcgggcagcggctgtgcgttcggtgcttccgcgcttccgggggtcaagtcgggacgcgggattacttgaacatccaccgtggtgttgccttgcgaatccctgccgaatgttgcgacaacctgaacgggattcccgttcctgtccgtgacgggacccatattcacttttgttccgggtgcgacttctactttttcggaataaccgggataaccggttgcctttatgtatttgtcgggattggcatcgactttcaacgataaaatctcttccagctttttggcatccatttcttctttgtattttgaattgcgaataagggaaaaatcagccccatttctgaaatcatcacctttattgaccaaacaatctccgccattccaattaaatgtgcaacgatttaaaacaaaattattccaatccaaagaacttaatttattcagttcttctttatgccaattccaaaacggacgtgccagcctatacatttggctttccatcaattctttgacttcggggaatctgctgtcatcggacataaggcgcataatcgaactgtcaacgccgtagcagccataggttctattaatacgtcttttgtcttcgtaccaaaggcaattactatattcgtagccttttacaaatttgtcggtttcggggtcgtattggtagccttgtgcctgtatgtcttctttgaaagtttcgtatacgtcatgggctaaaagggctgttccgacataaggaactgcccttgtgcttaatttcgcgcctaagcgggcaagtttgccgactcctgacaagacggcggcgcgggaaactgatgcggtaaatttaacggggactttttcaagagagcgtgcacctgttggcacgtgttctattattgaaggttcgataattcgacctgaaaaacgctgaccatcaacacgaaaatcggtaactacagattttttatgatcaatatccaatctaacatctgaatttccaataggatacttaaaacgttcagcataagaattaaccgaaaacatccccaacattaggattaaaatcaaacgttttaatttcaattccacgactataatcatcctgtaattctaaaatttttatatacgcaacagactcatcagaaaaataaattttccaaatattattagaaatccttctatttaaaaaacattggatttcttcatgaattataaatttattaacttttgaataatccaaaagctcactagcgaaagtatatgccattgttttaccataatacttgcttgacggctgatatttataaagtgccaactgcgcctgcgtgataaacggtttgttcattgttctgcctttcaaaggttgttttgaaagcctgattttaaaacacgtcatttaaatatcaaagcgacagacaaagccaagaagaaaccgagaagaaaccaaaaatcaataaccatcaatcaatcccaaccttgcccatgtcttttaaaaaattaatcaaaagcctgaagccgtaaatgactacgaacagaattaaaaccgtcgaaccgacataagaaccctgtttgatctgctcaaaattggaacatttcggataggacaacattaccggctttccgttcaagacccatttttcgcccaccctttccggcctgatgatttttccgtcctgggtaacagtaggaggaagggacgacaataaatagtcgtctgcatgcaatcttgtatcaaaacaatttatgccgacacgatagcccatttatacgcccctttttcttcactctgtttatttgacagatttaatcatgctccaagccattttgaagccttggattgcaagaatcacggtaatggccgccatacccacggcggaaaccattgacacgaaacccatgattacattcgctacttgcgtaccaatcgcggatggatcaaaggtatctgccataacaatggccggtgtgaagataccggctgccaaggctgcttttacagcgtattttttaacgatgttcatcgtttttttccttttttgatatttaaaataagacgacttcttgacttgcttcatccggacgaagtcttttccgaatctcgtttttagccgataaaatagaggattgcgaaaagaaaaagaaacatacagaccacccagccgataattagtgttgcaaggttcattttcatgatatttttcctttgttgcgggctttgtgaaaggttgacagaccgcccgccgagcctgtttttcttttattccgattttacgaagaactgaaatatctggaatcctccgcctatttcatttatgcctgaattcaacgcatcttcgtagctttcaaattgacctgctgatttaatattttgagtaaaccccacatcaccgaaaggatcgggataaataaagtcatgcgtttccaagtcttgaactatgaaacgttcttcaaatttcataaatcaacctttcggcttttctgccacctgaaaatcaattaatgaaggaaccatgcccttacctgtcgaagtcatttcaaccgttaccataacttcgcacgggtatttgagattctctaattttgagaaattcttactgtccccgaacttcatttgtgctgccgtgaatccaacagcatttcccgactgtgccggcaaaggtgttgcaaccaatacggaacaagtgtcgatattagagccatcaatttcgcctttgaattttttagctcctaaaaaagttgcgggataagttacagtttgagtttgattaaacatattaatttttcctttttaggttaattttgatttgcatgaagatcatacattctgtcgagataaagctgatattgcctctcactttccacatcgtgatgtggatcgaaaagccttttatccggatcgaatttatctgattgcttaaatttgataattccgagttcttccaattcaacctctaaatctacatccggttgttcgtggataaagccgaatttcaaagattccttcaatccggccaacgaatatttttcaggttctagccctttgggataccccaaatctgccttcagatatctgacaatttcatcactatcaaaacccatatcaaacatgaaattaatcagtttgccgaccgcgttttttgcgtatctcaatttatgctgaaaagttaaattagccacttttttacggtaatcgaacctttccggattcggcatatttttaaatttctgacaaatcgggaaagcgcctgaaaagtaagaaccttgatttatcagaatatccaaaggtatttccatatctccatgattaaactgaatttcgaaccttacccacttgctttctttatcgcctagctgcctgcctttctcataaacacgcacaaaacgagaatttttcttgcgacctacataaaatgtcttgccgctcccgtcctctctccgccaagccgttccaaccatttcagatttcggcctcatgttactgttatcgaaaaaaccgttatcgtgatccaaaagtgcctgttccggcgtgtactccccatcaaaaaaatcaagtgccaaatctacccgcgttatcctcggcctcaatgaatcttccaaaaactgcttaagcctcaattcccaacctggatttgcaatgttgcaacctacacctttcaattcgattaaaaccgtatttcgctgacctccgtaatggacttcgccgtagtcaacttcttccgatcccaacctaaacatcgaatcgtaaaatttattgcccttcgatttgcatctgctcgtgatgccaaaccctaatatttcctccaattttttgcttaaaacaaacatatattcggcatcggaaactaaggggcatccggaaactttcagcaaggaatcttcgtgcagtgtgaatgacaaccaatctataaaaacgccgtcctgcctgcccctacgttgcggaatttctaataacttcccattgccgttagatatgaaatgggaaaaatattctgcttcactcattttgttcagtacctttagggatttgttttatttcgctccccccctgttagtcaggggggggctttcagccgtttcccgtctgccgcgctaaagcgcgtccaacggtcaacgaccgaaagcccaatcctgacaaactgttaaagatcaagaagaaagaccacaaccgtctgttgtgataattaccggaaaattcgagccaaccgaatctatataatcgaacgcctgataaagctttgaaaaattttcttgttcagcgagtttatgcggttcaccatgcctgaactgatagaaacataaaacgcaataatctgattttttaaatattctccaataggaacaagaaaatattacatttgctactgacataaaaaagcccctttcacttggctgtcaaaggggaatgttaagaaaagtaatgcgcccctttgatagagcgcatcatataaggcgggaatccagtccgttcagtttcggtcgtttccgataaattcctgctgcttttcatttctagattcccactttcgtgggaatgacggcggaagggttttggttttttccgataaattcttgaggcattgaaattccagattcccgcctgcgcgggaatgatgaattcatccgcacggaaacctgcaccacgtcattcccacgaacctacatcccgtcattcccacgaaagtgggaatctagaatctcaaactttcagataatctttgaatattgctgttgttctaaagtctagattcccgcctgcgcgggaatgacgaatccatccgcacggaaacctgcaccacgtcattcctacgaacctacatcccgtcattcccacgaaagcgggaatccagtccgttcggtttcggtcgtttccgataaattcctgctgcttttcatttctagattcccactttcgtgggaatgacggcggaagggttttggttttttccgataaattcttgagacattgaaattctagattcccgcctgagcgggaatgacgattcataagtttcccgaaattccaacataaccgaaacctgacagtaaccgtagcaactgaaccgtcattcccacgaaagtgggaatctagaatctcagactttcagataatctttgaatattgctgttgttctaaggtctagattcccgcctgcgcgggaatgacggctgcagatgcccgacggtctttatagcggattaacaaaaatcaggacaagacgacgaagccgcaggcagtacaaatagtacggaaccgattcacttggtgcttcagcaccttagagaatcgttctctttgagctaaggcgaggcaacgccgtactggtttttgttaatccgctataacagcaaccttgtcgccgtcattcccgcaaaagcgggaatccagtccgttcagtttcggtcatttccgataaattcctgttgcttttcatttctagattcccactttcgtgggaatgacggcggaagggttttggttttttccgataaattcttgaggcattgaaattctagattcccgcctgagcgggaatccagtccgttcagttccggtcatttccgataaattcctgctgcttttcatttctagattcccactttcgtgggaatgacggcggaagggttttggttttttccgataaattcttgaggcattgaaattccagattcccgcctgcgcgggaatgacggctgcagatgcccgacggtccttatagtggattaacaaaaatcaggacaaggcggcgaagccgcagacagtacagatagtacggaaccgattcacttggtgcttcagcaccttagagaatcgttctcttttttgttcatccgctatattgtgttgaaacatcgccacaaacctgatatagtccgctcctgcaacatcattgaaaatctttctttttaatcagttaaaaccgaatacggagtcgaaaatgaatccagcccccaaaaaaccttctcttctcttctcttctcttctcttctcttctcttctcttctcttctcttctcttccgcagcgcaggcggcaagtgaagacggcagccgcagcccgtattatgtgcaggcggatttagcttatgccgccgaacgtattacccacgattatccgaaagcaaccggtacagacaaagacaaaataagcacagtaagcgattatttcagaaacatccgtgcgcattccatccacccccgagtgtcagtcggctacgatttcggcggctggaggatagcggcagattatgccagttacagaaaatggagcaacaataaatattccgtcaacacaaaagtgttgaaagaaaaccagggcaacaggataaaactgaagacggaaaatcagggaaacggtacgttccacgcctcttcttctctcggcttatccgccatttacgatttcaaactcaacgataaattcgataaattcaaaccctatatcggtgcgcgcgtcgcctacggacacgttaaacatcaggttcattcggtggaaaccaaaaccacgatttataccactgcaccaacgggagacgctacagtgggaggcactatcccagagagaccgagtagcaaacctgcctatcacgaaagcaacagcatcagcagcttggggcttggtgtcatcgctggtgtcggtttcgacatcacgcccaagctgaccttggacaccggataccgctaccacaactggggacgcttggaaaacacccgcttcaaaacccacgaagtctcattgggcatgcgctaccacttctgattccccgataccgatgccgtctgaaccttcagacggcatgagacctttgcctgcgtacttggtacgctggtcgcctccgaacatggcgcgacacccgacatttccgccgaacgcatcgggcgtttcatgaatccggtttaaaacgcatggaaaaatgccgtctgaaagcctttcagacggcattgtgcttgagattccgtttaccaatggctgacaaacgcttccaaatcggtattcttgggcttatgcacttcctctgtcggcgtgccgaccatcatcagcccgatgattttatccttatccgcacaaccgaaagcctcccgcaacagggggctattgacccacatccccgtaatccagacattgtcgaatccctgagccgttgccgccagttgcagcgcatacgccgcacaacccgccgtcagcatctgctcccattccggtttcggcttaggcacatcgcggttcggcgcaaacgttaccccgataaccatcggcgccatattgcccactttttccgcctttttcatcgcatcgtcgccgaaattcaattcggcaaccgtttgcttcaacacatcgcgaaaacgttgcaatcctacctcgccttgaatcacggtaaaacggaaggggcgcatattgccgtgatcgggaacttgggttgccgcctgaaatatttgttccaactccgccgcatcgggggcggggtgcttcagctttttggaagatcggcggttcgtcaataattttaaagcatccatatcgttatactccggtcatcggtcgggtgttcggacacatatgccgtccgaaggcttcagacggcatatccggcatcagcgcggacggcggcaggctgccaatatatccatttccttccgataggtttggctattggaaatgtccatcagccccaataccgtgctgaaatagtggtcgtgcgaatattcgttttccgccgctttttgtttgaggcattggaaatctatgcccccgtgttggcggaaggctttggaaaaccacataaccatcgggatatgcgtctgcccggaaggcgcgatggcgtaaggcgcggcgtgcaggtacatcccgttttcgcccaaactttcgccgtggtcggaaacataatgcaccacgctttccaaatcgtcgcggttttcaagtttgcggataaccttgtcgataaactggtccacatacaaaaccgtattgtcgtaagtgttgaccagcgtggcgcgggtgcatttgttgatttcgttggtgtcgcaggtcggcgtgaatttgcgttcggcttcggtatagcgttcgtaatacgtcggcccgtggctgccgatggtatgcaggattaaaaccgcgtctttatcgtttttgttgaggacttcgtcgaacttagtcagcaggatattgtcgaggcactcgccgttgcggcagtattcgggcaggttgagcgaggtaacgtcggtattcggcactttgccgcacacgcccttgcagccggaatcgttttccaaccaagtaacttccacgccggcgcgctgcacgatgtccagcaggttgtcttggtgttcggctttgatttcgtcataatccgtgcggtcgaaggttgagaacatacacggcagggagtgcgcggtcgatgtgccgcagcttctgacctgcgggaaattgacaatttcatcgccgcgcgcggcaagcagcggcgtagtttggcggctgtaaccgttcaaaccccagttggcggcacgcgtggtctcgcccacgaccagcaccacgaaacggcgcaggctgccggccgggcggttttgcacgaccgccatatccaattgcgtataaggaatattggaacgcttccaatctttgtatttcgacacgcccgcgccgatgaaattagacggcacaatcagatgggttactgatttattgttgcggaaaaacgaggcgtaatcctgatattgcaacattgcgatgcccaacgcgcacaaaaaggaaacggcggcaagcacaaggcgcgtcaaaagctccttataccaaacgcggtatttaaccttgacggcgatatacgccagcgcgggcaatacgcccaaacatacaatccacagcacatagcccggcgtaatcaggcgcgcgctttcggcagccgtagtttgcaagacattattcaacatcgacttgttgaaatagatattgaaaaatatttcttggtaagacaccgccgcactgataaccaatatcaacggaatcaataccttatgcacgaaaggcagggcaatgacgtgaaaaacgaaattacttaaaaaaaacagcaccaccggcatcgtatagaggaagatatccgccccggtgccgttaaaaggatgaagctcgacaactttggcaaaaaaggcgtaattcaataccagcgaggaatacagggaaaggaaggcaatcagcgcggaagagccgagcttcggcctcaggttcggttttatcatttggaatgtgtcggataagggttggaaaaggcatccggcatttggaatccggattattgaaaaagattcttaattataaggcaacggagcaaagcagggcaagaaaacggcggctgtgcggggggttccgcccgccattcaaacgtccggcagacataaaaacatcgtaagcaagattcgaaccggtctgcaaccgcccctgccagaaaaacgggcaaagcatttcatattggaaaaacccagccgcgccgccgacgggacagtccggcacaaacagcatcacgctcggattgaaaaggacggatagccgccggcagcacaatcttaccacctccaaaacgccgccggagaacgccgaaacagccgatgccgtctgaagccgcttcagacaacatcgggacatcaaccgtaacgccgttggaaatcgcgcataaaatctgccaaagcccgcacgccttcaagcggcatcgcattataaatgctggcacgcataccgccgacggttttatagcccttaagcaggcacaagccctgcaattcggcttccagcacaaaacggcggtcaagctcctcatcccccgtttggaacacgacattcattttagaacgcgcattcggacggatacggttgatataaaaaccatcgctgccgtctatcgtctcatacaaggtttgcgccttcagccgattgaccgcttcaatttttttcacaccgccctgcgcctgtagccagcggaacaccagccccgacatataaatcgcgtaagttgacggcgtgttgtacataccgtcgcggttgatgtgcgaacggtagttgaacacatcgggaatatcgttcggacaacgctcgagcaaatcctcacgcacaatcaccaccgtaactcctgccggcccgatgtttttctgtgcgcctgcgtaaatcagtccgtagtcggcaacatcaaactcgcgcgacaaaatctcgctggacatatcgcacaccagcggcggcatgccttctgaaaggcacggcacttcacggtattgcagcccgttgaccgtttcattgacggcaaaatggacaaacgccgaatcgggtgcaacatcccacgtttccacaggcggcaggtcgagatagtcgaactgctcgccgccatgcgccgccaaacggatttccgtatcggtcaaacggctcatctgttcataagcgatacggctccagttgcccgttaccaccgcgtcggcagtgcggaaaccgtgtgccagattcatggctgccatattaaattgggttgttgctccgccctgcagaaacaatatcttatagttgtcaggcactttcaaaagctgcctcaaatcctgttccgcatgatgcaggatgctcaaaaacatttccgaacggtggctcattgccatcacaggaaaacccgtaccgttgtagtccaacatttcctgccgcgccgtttccaacacggcttcgggcaatacggcagggccggcggaaaaattgtaaatcggataaagagacatgatgcagccttgattctgaacaataacccgcccgattttaggcttgcagcaggctttgtgcaaggatggaaaatacctgtcctccgcccgattccatgccgcccgaacacggaaaataatatcaatatattgatttacaaacataaaaatcatgcacgcgacaaatagatacatttgttttgtcaacaatattcacgatttcccattacaaacctcccttacacccgcttttttccgtcccaaaaacacaaaataaatcaacactttcatttctccgcaaaagcggttataatcacgccgatttttcaactttgacgaaaaatggccacggggccatttttttattatgtacatagggagcagcatggatatccaaaccatcctcgaaaaaaccctgcccggcctgggctacgaactggtcgatttcgaactgaccgcgcaaggaacattgcgcgtgttcatcgacaaagaaagcggcattaccgtcgaagactgcgcaaccgtcagcaaccacttgagccgcgtcttcatggttgaagacatcgactacaaaaacctggaaatttccagccccggactcgaccgccccttgaaaaaagccgccgacttcgtgcgctttgccggtcagaatgccaaaatcaaaacccgcctgccgatagacggtcagaaaaactttatcggtaaaatcgaaggctgcgaaaacgataccgttaccgtatccttcgacggcaaaaccgtacaaatcgaattgggcaacatcgacaaagcccgtctgcgccccgaattcaaattctaaaacacaacaatattggagatgttcaaaatgagtcgtgaaatgttacagctggcagaagcactggcaagcgaaaaaaacgttgatgcggaagtcgtcttccaagcactggaattcgccctgtctaccgccgccaagaaaaaggcagaccgcgaacacatggacgtgcgcgtccaaatcaaccgcgacaccggcgaataccaaaccttccgccgctggctgattgtcgccgatgaagactatacctatcccgatgtcgaaaaaaccatcgaggaaatccaagaggaaattcccggcactaccatccaaatcggcgaatactacgaagagcagctgcccaacgaaggcttcggccgccaagccgcgcaaaccgccaaacaaatcatcctgcaacgcatccgcgatgccgagcgcgagcagaatctgaacgagtttctcgccgtcaaagaagacatcgtgtccggcacggtcaaacgcgtcgaacgccacggcatcatcgtcgaagtcgttgccggcaaactggacgcgctgattccgcgcgaccaaatgattccgcgcgaaaacttccgcagcggcgaccgcatccgcgccctcttcctgcgcgtcgaagaaatcggcaacaccggccgcaaacaagtcattctgagccgtacttccggcgatttcctcgtcaaactgtacgccaatgaagtacctgaaattgcagacggcatgcttgaaatccgcgctgtcgcccgcgacccgggacaacgtgccaaagtcgccgtcaaagccaacgaccagcgcatcgatccgcaaggcacctgtatcggcgttcgcggttcgcgtgtcaatgccgtcagcaacgaattgtccggcgagcgcatcgatgtcgtcctctggtcgcccgaacccgcgcaattcgtgatgagcgcgctctcacccgccgaagtcagccgcatcgtcatcgacgaagacaaacacgccgtcgatgtcatcgttgccgaagaccagctcgcgctcgccatcgggcgcggcggtcaaaacgtgcgccttgcttccgacctgaccggctggcagctcaacatcatgacttccgccgaggcagacgaacgcaatgcggcagaagatgccgccatccgccgcctgtttatggatcacttgaacgtggacgaagaaaccgccgacgtactggttcaggaaggttttgcaaccttggaagaagtcgcctatgttcctgccgccgaactgcttgccattgaaggatttgacgaagaaatcgtcgatatgctccgcaaccgcgcccgcgatgccatcctgaccatggcgattgccgccgaagaaaaactgggcgaagtgtccgacgatatgcgcaacctcgaaggcatagatgccgatatgctccgcagccttgccgaagcaggcattaccacccgcgacgacttggcagagcttgctgtggacgaactgattgaaatcaccggtgtaaacgaagaaaccgcaaaagccgtcatcctgaccgcacgcgaacactggtttaccgaagacaaataaagggggtacagatgagtaacacaaccgtagaacaatttgccgccgagctgaaacgccccgtcgaagacctgttgaaacagttgaaagaagccggcgtcagcaaaaacagcggcagcgattccctgacgctggacgacaaacagcttctgaacgcctacctgaccaagaaaaacggcagcaacagcagcaccatcagcatccgccgcaccaaaaccgaagtcagcaccgttgacggcgtaaaagtcgaaacacgcaaacgcggacgcactgtcaagattccttctgccgaagaattggcagcacaggtaaaagccgcccaaacccaagccgcacctgtccggccggagcagacggcagaagacgcggcaaaagcccgagccgaagctgccgcacgcgcagaagcccgtgccaaggcagaagcggaagcggcaaaactgaaagcggcaaaagcaggcaacaaagccaaacctgccgcgcagaaacccaccgaagcaaaagccgaaaccgcacccgttgcggcggaaaccaaacccgccgaagaaagcaaagcggaaaaagcccaagccgacaaaatgccgtctgaaaaacccgccgagcccaaagaaaaagccgccaagccgaaacacgagcgaaacggcaaaggcaaagatgccaaaaaaccggcgaaacctgccgcacctgccgtgccgcaacccgtggtcagcgcggaagaacaggcgcaacgcgacgaagaagcacgccgtgccgccgcacttcgcgcccaccaggaagccctgttgaaagagaaacaggaacgccaggcacgccgcgaagccatgaaacaacaggcagaacaacaggcaaaagccgcacaggaagccaaaaccggcagacagcgtcccgccaaacctgccgaaaaaccgcaggcagccgcgccagccgtcgaaaataaacctgtcaatccggcaaaagcgaaaaaagaagaccgccgcaaccgcgatgacgaaggtcaaggccgaaacgccaaaggcaaaggcggaaaaggcggacgcgaccgcaacaatgcacgcaatggcgacgacgagcgcgtacgcggcggcaaaaaaggcaaaaaactcaaactcgagccgaaccaacacgccttccaagcaccgaccgaacccgtcgttcatgaagttttggttcccgaaaccattaccgttgccgatttggcgcacaaaatggcggtcaaaggcgtggaagtggtcaaagccctgatgaagatgggcatgatggttaccatcaaccaatccatcgaccaagacaccgccctgattgtggtggaagaactcggccacatcggcaaacctgccgcagccgacgaccctgaagcattcttggacgagggcgcggaagcagtggaagccgaagcattgccgcgtccgcccgtcgttaccgtgatgggccacgtcgaccacggcaaaacctcgctgctggactacatccgccgtaccaaagtggtacagggcgaagcgggcggcattacgcagcacatcggcgcgtaccacgttgaaacccctcgcggcgtgattaccttcttggacaccccgggccacgaagcctttaccgctatgcgcgcacgcggtgcgaaagcaaccgacatcgtgattctcgtggtcgccgccgacgacggcgtgatgccgcaaaccatcgaagcgattgcccacgccaaagctgcgggtgtaccgatggtggttgccgtcaacaaaatcgataaagaagccgccaacccagagcgtatccgccaagagctgaccgcacacgaagttgtgcctgacgaatggggcggcgatgtacagtttatcgacgtttccgctaaaaaaggcctgaacatcgatgcattgctcgaagccgtcttgctcgaagctgaagttttggaactgaccgcacctgtcgatgcgcccgccaaaggcatcatcgtcgaggcgcgcttggacaaaggccgcggcgcggttgccacattgctggttcaaagcggcacgctgaaaaaaggcgatatgctgctggccggtacggcattcggcaaaatccgcgcgatggtcgatgaaaacggcaaatccattaccgaagccggtccgtccatccccgtcgaaatcctcggcttgtccgacgtaccgaatgcgggtgaagacgcgatggtattggcggacgagaaaaaagcgcgcgaaatcgccctcttccgccaaggcaaataccgcgacgtgcgccttgccaaacagcaggcggcgaagctggaaaatatgttcaacaatatgggcgaaacccaggcccaatctttgtcggtcatcatcaaggcagacgtgcagggctcttacgaggctttggcgggcagcctgaaaaaactgtccacagacgaagtgaaagtgaacgtgttgcacagcggcgtgggcggcattaccgaatcggatgtcaaccttgccatcgcttcgggcgcattcattatcggctttaacgtgcgtgcagatgcctcttcgcgcaaacttgccgaaaatgaaaacgtggaaatccgctactacaacatcatctacgatgccatcaacgacgtgaaggcggcgatgagcggtatgctttccccggaagagaaagaacaggttaccggtacggtcgaaatccgtcaggtcatctccgtttccaaagtcggcaacattgcaggctgtatggttaccgacggcgtggtcaaacgcgattcccatgtccgcctcatccgcaacaacgtggttatccacacgggcgaactggcttcgttgaaacgctataaagacgatgtaaaagaagtccgcatgggcttcgagtgcggtctgatgctcaaaggctacaacgaaatcatggaaggcgaccaactggaatgcttcgacatcgtcgaagttgcccgcagcctgtaattcctttgcaaataaaatgccgtctgaagcgttcagacggcatacgaaacgggttctgtatcatacagaacccgttttttgtcgcaaatcggcttcagacagccctcttgccttatcccgatttgaatctgacttgccatacaaacaggcttcagacggcattatttgcccgctaaacgtatcccaagcttctccgcatattccctgcgttcggcgcggctggtttccgggcggtgcgtattgagcgacgaccatttccaatgactgcgggctttgttgagttcgggcgggagtctggcggcatcccacgggactttgcggctgtgcagctcgatatccgactgtgccgcgtgtccgcgcgtttgcaggacgtggagcaaatcgagggcgcgggcggcgagcagggtcagggtttcagggtcggtgtgcagggtttggcggccagcgagtttgtcggaaatggtgcgggtattgggcaggatgccgcccaaaaagccgccgattgccgtacccaatccgagcgagccgccgagtgtggcgatgtccagccccaagccgatgagcgcgccggttgccgcgcccgtgccggtgcggatgccgtattgtttgagcaattcgctgtcgaacgggtcttggcggaaggcttgcggcatccagtcgccgccgtcgatttcgctgtggtagaaacggtagagggcaaacagccgctgctgcatctgccgttcgagttggcgtatttccgcctgcatggtttgcagcacggtggcggtatcctcgttttcgtccacttcctgcctgaaggcggcggcatcaattaaaaagtcggcgatttcgcggcgcgcttcgccgtccagccgctgccattcgcgccggcgcatggctgtcaggcggtcaagtgtgctgcgttcgggcaacatggtggcgaggttttcccacaggcgcagttcgccttcaaaatcaaaggcgacggtgtcgaaccctgcgaaaacgtgcaggtttctcctcgccagcatggttgtccacgattcgggaagctgtccgccggtaaagttgaacacgggcataaccggtttggcacaccatgaaaggatggtcaactcgtccctgtatttgtcgaggacgggttcgcgcgcgtcgatgacgtacattgccatatcgctttgcaagacttgccgtaagactttggcttcctgattgaaatcatggtgcgcaccgtggctgccgagaaactgttgcagccgttcgatgccgtctgaacgattgtccgtatggttttccagccattccagcacgccgcccgcgtcttcgagtccgggcgtgtcgtacaggaaaaccagcgtgtctgcgccgtcgctgatggcggcttcttcgacatgacgcgtggtcgatggggcgtttttgacttcgccgaaaccgctgtcgcgcaaaagggtacgcaggagcgaggttttgccggtgttggtgtgtccgacgacggcgagggaaaggggttgtttgttcatgatgtttttgaagaatggattttcagacggtcttttttcagaatggcggcttaacagaacatttcaagtgagtttattggtctttcaaacgcccttcctgcgccgccctgtcaggctcaagccacgccgcgccgcattcggccagcgcgttacgccaatgttccagcttttccgaaaggtcgtctgaaagcccctgttccgccaaaagctgcaccaccgcgccgccctgcgccgcttccgagagtcggacaatctgccgcaacacgccgcggtccggcacagtttgggcgcgcacgccgataagcagttgcgccggtttctgcttcagctctgtctccagcgcggcaacctgttcccgattggtggcaacgcccttatccagccattcctgcgccagcctgccctcgaaccattcgccgtcctgccactcggtctccagcatgaccgcccatttcggcgcatcgttcaagatgattttcggtgaaacggcggacacggtttcccgacgcgtatccgcatcggtgattttgttctgccagcggcggatgaccgcctgataatagggcttttccaaatccaatccgttttcgcttgttttcaaaaggattttacacactacccaagccagcaggcgcggcaggatgccgtagcaggcgatactgccgaccagcagccccgaccaagcccgcgcatcggcaatattgccgttcagacggccttcgatgaccgcccgcgcatcggggacagggaaaccgagtttcgacggcagccatgccaacatttccaccgcgcgtaccgaagcggcattgctcaacagcgtgctttcccagttgaacgtatattgccgcaccaaaagcagcaacaataccgacaccagcattccgagcagcgtgcagagccacaggctgtgcgacgttgcgcctattttccaacgtaccgaaggttgccgccactcgtccgcatacagccgcaacaccgcctgatttacagggtctttgccccgaaaccacgtcgccggactgctgaaaaaacgccccactttcacacgcaggaacaacattgccaaccatactgccagcatcagcgtattcatgcccaacacgcccgccaaaaccaaaaagaaattcagaccctgattgtccattagaagataagtgactgaaaaaccggtaaaaaatgcaaacgtcgccgccaccacccacaaccagaacgaccccgcacgcacacgttccaacgtctcccgcagcatacggttcctgtcaatcatctccgcccgacggatgattttttcctccgtactgccgtccacgcggcgcaaagcctccgtcgcctgtacgggatcgccgctgaaaataaaaccgccttcgtccaaaatacggaccagctcaaccagttttcgggatggattcaacataaaatgccgtctgaaaataaaaaacagattttaacacacgcattttcaagaatattcacagtgtaggcaaagagtaaatctcacacagaagcaaaagtatcggcgtaaactgactgcctctactttcccgaaagattgtgcgatgtatacaggcgaacgcttcaatacttacagccatttgagcggtttgattctggcggcggcaggtttggcgctgatgctgctgaaaaccataggacacggggacggctaccgtatcttcagcgtatcggtttacggcatcagccttcttctgctctatttgagttcctcgctgtaccacggaattgcagccggaaaactgaaaagcattttgaaaaaaaccgaccactgcatgatttatgtgctgattgccggaagctacacaccgtttgcactggtttctttgagaaacgggccgggctggacggtattttcactgtcctggctgctggcggctgcaggaatcgcacaagaactcaccatcggacggaaaagcgaaaaacgtctgctgtctattgtgatttatgtcgtcatgggttggatggtcttggcggtaatgaaatccctgacagcctcactcccgtcggcaggactggcttggctggcggcaggcggtatgctgtacagtgtcggcatttactggtttgtaaacgatgaaaaaatccgacacgggcacggaatctggcatctgttcgtattgggcggcagcatcacccaatttgtcagcgtgtacggttacgtaatctgaatgccgtctgaaaagcaaaacctcccgttcctgaagattgggaggttttctgtttgccggacatcagcccttgtcgtggaactcgtggaattcatactgataggacaaatcccgacccgcttttttctgtgccaaataatcatcataaatggcgcggatttccttacgcaacaaaaacagggctatcaggttggggataaccataaaaccgttgaacatatccgacagactccaaaccaaatcgactttgccgagcgtacccaaaacaatggcaagcagaaccaatgcgcgatagatgcccaagtgtcttcccctgaaaagaaaacggatattggactcgccgaaataataccaaccgatgatggtggtgaaggcaaagaaggtcagacacacggcaagcaattgcgaaccgaagcccggaaatgccttgttaaaggcaaattgagtaaccgccgcgccctgttcgcccgaaaggttggcatcggtcagcaggataatcaatgccgtagccgtacataccaaaatcgtatcgataaacacaccgacaaatgccgccataccttgctgcacagggtgcttcacatccgcagtcgcgtgggcgtgcggagtcgaacccatacctgcttcgttggaaaacagaccgcgcgccacgccgaaacgtatcgcttcgcgcataccgatacccgcagcaccgcccaaaacggcttcgggattgaaggcggcggtaaagatgtggttgaacatcggcacaatatggtcggaaaattcaaacaggataacgacggcgcacaaaatataaacaaccgccataaacggcacgacaaattgggcgatattggcaatacggttcacgccgccaatcacaaccatgcccgcaaggacggcaagcacaataccgactgccaaagaaggcacatcaaatgcaatggtaacggcagaagcaatggagtttgcctgtgtcgcattaccgataaagcccaatgcgataatcaacgcaatggaaaagaaaccggacaaaaaacgcgccgcgcccctgccgattttcggagtcagaccgtgggtgatgtagaacgccggcccgccgatgtatttgccgtggctgacgacgcggtatttctgcgccagcagtgcctccgcaaaaatcgtggacatccccaaaacggcagaaacccacatccaaaaaatcgcgcccggcccgcctgcggtgatggcggtcgccacgccggcaacgttgcccgtaccgatttgcgcagatatggcaaccgccaacgcctgaaactgcgataaagacttgtcgtctttatcgcctttggcaaacaagccgccgaatacggatttgaatcccgcgcccagcttggtaatctgcggcgcaccaagatacagcgtaaaaaacaggccgatacccaaaagcgcgtaaatcagcaggtagtcccaaaggaaccgattgactgtacccaccagaacagacaatatattttccataaaataaaccttatcttacaattaaaatgactgccttccaaaagacattccaataaggaaacacggcgagcagaccgtatttgccgcaacagatgccttaaattgtcaacaatcggggagaagctgcgccatcataccgtaaaatatcgttaattaaaacatttctttatttttaagcggaaagcggaggaaatcgctttcagacagcatagacaacggcacggcataaaacaggatattttgggtacttgcaacttatgttaaaatgccgaccgtaaaaaatctgacaaaaacagattaattatttgaaataagaaaggaaatttatggcaggccatagcaagtgggcaaatatccagcataaaaaagcccgtcaggatgccaaacgcggcaaaatctttacccgtttaatcaaagaaatcaccgttgcggcgcgtatgggcggcggcgaccccggttcaaatccgcgcctgcgcctggctttggaaaaagcagccgaaaacaatatgcccaaagacaatgtgcaacgcgccatcgacaaaggcacgggcaacttggaaggcgtggaatacatcgagttgcgctacgaaggctacggcatcggcggcgcggctttgatggtggactgcctgaccgacaacaaaacccgcaccgttgcggacgtacgccacgcgtttaccaaaaacggcggcaacttgggtaccgacggctgcgtggcgttcaacttcgtgcatcagggctatttggtattcgaacccggcgttgacgaagacgcgctgatggaagcggctttggaagccggtgcggaagacgtggttaccaacgacgacggttccatcgaagtcattaccgcgccaaacgattgggcgggcgtaaaatccgctttggaggcggcaggttacaaatccgttgacggcgacgttacgatgcgcgcccaaaacgaaaccgaactctccggcgacgatgccgtcaaaatgcaaaaactgattgacgcgctggaagacttggacgacgtgcaagacgtttacacttccgccgtattgaatctggactgatacgcagcacagcagacatacaataaaatgccgtctgaacctttcagacggcattgatttatttagcccttgcccacgcccaccaaaccgtcaggacaaccgccagaaaatacgccacgctccaaacaggcaaagcaattcccagcagataatccggttcagcacaatttccgaacccgcgcacgacaggctcgaaccaatcaaacaaaggccagcctttcaagcggaacgtccacggcgcgccgcacgaaggagcggttcccggcggcagcgactgcaaccacaactgatatgccgcaacagaaatacccgtaacggccggaatgctgataaagacagcaccgaacaaaccgcctgcccttcttcttggtctgcacatcaggacaattgccgtacacaatgcggttgccaaaacgcataaccgctgactgatacacaaaacgcaaggctccatacccaaaacatactgtgccgccaaagaaccggcaaatgcacagaccgaaacggcaaacagcagccaaacggcttttctaaataacggggtcattttctcaacacaccaatcaaaataccgatatgccgattttgctggatatatcccgagatggcaagggacaaaacggcgatttgcccgcacaatgcccacaaaaaaatacatccggaggatttgaatttcagcaaatttagcgaatcaaaagtttatttcaatgaaatcatatgatttttttgaataagcggattgatgggtttttgaaggaatttgttaccggatagccatcgggcaagttttttgcaaaatttgaatcggtcgggtaaattttcaaaaaataattgacagcggataagaaacggcggataattcccgccgtcgagttgcttgatgcagcttgatttttctcctctatttctcctttgtagacttggcacacattcaactggatgtgtgcatttttttatctccgctttttttgaaatttaattacttttattgtttgaaattccattctttaagaaatttaacaagaaaaacgcttgctttttgaccggaaaagctgcataattcattccgttagctggttcgagtagtcagttaatagtttctcctctatttctcctttgtagacttggcacacattcaactggatgtgtgcatttttttatctgaagcaacaagcctctgtgcgtgatgttgttatgtttcatttaggtgtcaaaccgcatatccggtctgaaatattcaatccaaatccaaaaccggattttctttgacctcctccatcacaacataactcctactctccgaagcggcaggcagttgcaataggatattgcctagcatatcccgataggcagacatatcgggcaaacgtactttaatcagatagtcgtattcgcccgacaccaagtggcattccataatttgcggaattttcagcacttcttttttgaaatcttcgaaaatattgcccgatttggattgcagcttcagctcgacaaaaaccaataaaggtttgcccaacagatggggattgagatgggcgtgataaccggaaatataatgttcccgctccaaacggcgcaccctctctgtaacgggcgtggtggacaagcctaccttctcggcaagctccgtcatcgggatgcgggcattctgttgaaggatcttaaggatgcggaaatcgattttatctagttctttcatttagattgccttgtatttattattgattttaacaaatagagtatatagtggattaacaaaaaccagtacggcgttgcctcgccttgccgtactatttgtactgtctgcggcttcgtcgccttgtcctgatttttgttaatccactatatatttgagaaagcgattatatcaggaaaagcaaaccgccttcctacctgaaaactgctgcttcggcttgaagacacaaggttctttaatattttaaaagccttgccgttggattataatcccccaaccgatttcttaattttgctaataaacacttgcttggtaaggaatgaatttatgcgccctttgaacgtgcagatcaggttgggcaaccttaggcacaattatcggattttgaaggaaatgcacggaggcaaactgttggcggtagtgaaggccgacgcatacggacacggtgcggtcagatgtgctttcgcgctggcagacttggcagacggctttgccgtggcgacaatcgatgaaggaatcaggctgcgggagagcggcattacccatccgattgtccttttggaaggcgtatttgaagcatcggaatacgaagcggtcgaacaatactcgctttggccggcagtcggaaaccaatggcagcttgaggctttgctgatccgccattggaaaaaaaccgtcaaagtctggttgaaaatggattcggggatgcaccgtaccggttttttccctcatgattacgcttcggcatatgcggcattgaagcagtcggaatatgtggacagtattgtcaaattctcgcatttctcctgtgcggacgaacccgaaagcggtatgacggaaatacagatggaagcattcgatttgggtacggaagggctggaaggcgaagaaagccttgccaactccgccgctattttgaatgttcccgaagcacgcagggactgggggcgcgccggtctggcgttatacggcatttccccgttcggaggaggcgatgacaggctgaagcccgtgatgaggctttcaacccgtattttcggcgaacgcgttttacagccgcactcccctatcggttatggcgcaacattttataccagcaaatctacgcgcgtcggcctgattgcctgcggttatgcggacggttatccgcgccgcgccccaagcaattcccccgtcgctgtcgacggcaaattgacccgggtcatcggcagggtctctatggatatgatgaccatcgagctggatgcttcgcaagaaggtttgggacacgaggtcgaactgtggggcgatacggtcaacatcaataccgttgccgaagcggccggaaccatcccttacgaattgatgtgcaatatcaaacgtgcaaaattcacttatatcgagtaatcaagtccaaacgaaaatgccgtctgaagcctttcagacggcatttccccatcaaaaccgcaatcagtttttcatcgattgaaccggagccggaattctgccgcctcggttgacgaatacttcgcacgaaccttctttgaccggcatcacaggcgcgtagcccaacaagccgccgaactcgacgctgtcgccgacggttttaccggttaccggaataatgcgcacggcagtggttttgctgttgatcatgccgatggcggcttcgtcggcaatgatgccggaaatggtgtgcgcgggcgtgtcgccgggaacggcaatcatatccaagccgaccgaacaaacggcggtcatggcttcgagtttgtccagcgtcagcacgcctgcttcggcggcggcaatcataccttcgtcttcggaaacggggataaacgcgccactcaaacccccgaccgcgctggaagccatcatgccgccttttttcacggcatcgttcagcaatgccaaagctgctgttgtgccgtgcgtaccgcagacgctcaagcccatttcttcaagaatgcgtgccactgagtcgccgacggcgggggtcggcgccagcgacaagtcgagaataccaaacgggatattcagcatttttgaggcttcgcggccgatgagttcgcccacgcgggtaattttgaaagcagttttcttcactacttccgcaacttcggtcaatgtcgttgcatctgaattttccaacgcggcttttacgacacctgggccggatacgccgacattgataacggcatccgcttcgcccgaaccatgaaacgcgcccgccataaacgggttgtcttccaccgcgttgcagaacacgacaattttagcgcagccgaaaccttcgggcgtgatttccgccgtgcgtttgacggtttcgcccgccagcttgaccgcatccatattgataccggcacgcgtactgccgatattgatggagctgcacacaatatcggtagtcttcatcgcttcgggaatggagcggattaacacctcatccgaaggcgacatccctttttgcaccaacgcggaaaaaccgccgataaaagacacaccgatggctttggcagctttatccaaagtttgcgccacgctgacgtaagaatcagcatgggtggccgccgcgatttgggcaatcggcgtaacggaaatgcgctgattcacaatcggtacgccgtatttggcagacagatattttgccgtagtgaccaagtctttgccgactgtggtaattttattgtaaatattttggttcaacacattgatatcgctgctgatgcagtcgtgcaaatcaatgccgatggtaatggtgcggacatcaaaattctggtcggcaaccattttgacggtttctaaaatttcgccggattggatactcatcacattcctccaactcaaatgcggtgcatcgcttggaagatttcttcgttttgcatacggatatcaagcgcgagttttttgctctcttccgcaaacaaatccaaaacctcttgacgcgatttgctgcattttgaagtgtccaccaagataatcatagtaaaaaaatcgtccatcagctgttggctgatgttgagaatattgatttggttttccgccaaaattttggaaacatcgtacacgatgccgacgcggtctttaccgatgacggtgatgactgaattgttcacaggcttactccttgcagatatccgttaaagtccgaaattataccaccgttggattttgaagaaatattgtcaacaatatatacatacaaaatgccgtctgaaactatttcagacagcatcaagattcagggttcgattaaataaccatccttatcccactgggttttcctgaccaacttgtcatcctgataaacagcttcgctctttttagaaccatcttcataccactccaaaaccaccccgttgcgttgatggtggcggatagacagttccgagagtaatcggccgctttcatcccaagtcagaattttggcaggctcatcgttgaccataaccatttccgtcttgatactgccgtcggcataccattgcttccatacgccgtttgccttattttgcttaaactggatttcgctttccttgccgccgttacggtaatagcggtatcccgtaccctcactcaagccatttttataaggcataacggcagattttttaccgttcggataccagttgacccactccccgtccggcttacccttgctgaagccccccgccatttttttctgaccattaaaatgccacaaaatcaacataccgttttgcagggtaggcacaaaagatttgatttgcgttgaagcaacgatataaggttcagaatatttcttcatcgacggataataaaaatcctgcgcgtgcgcaatacccgccaccacactatattgcctgatataagcggcagaagacatcgtcgccgtcagctttccgttctgattaaaataaacagaataggtctgcgccggcaaagcggccgaaaaacccaacaggacagttgaaaatacaatccgagataattttttcattgcaatagcgatataaaaacaaggctgtgttttagtaatctgttgatttcaattatttgcaagggaaaagacaattattttccggttaggaataaacctattctattgaatatattgaagccaagtacgcctatcaacactatattaaaacactgccaaaaacaattaacttataaacaatatggtaaggatttctctgccaagcatcaaacccgagacaacgtatcgtaaaaatgccgtctgaaaacaaatcgtcttcagacggcatttccccttcaactcactcttcacccaataactgctcgcgcgtcaagaggaaaacaaaaccgtcgcccccgctggtttccaaccaagtaaaaggcaactccggatacgctgcttccaatacatccctgttatgcccgatttccaccagcaatacacctttgggattcagaaactttgccgcattcagaagaatctgcctggtggcatccaacccgtccgccccgctgcccaatgccaattccggttcgtgcaaatactcttcaggcaataactcaaccgattccgcatccacataaggaggattggaaacaatcaaatcataagtgccttccaatccttcaaacaaatccgtatgaataagccggatgcgttcttccaaaccataatcttcgacattaatccctgccacttccaaagcatccaagctcacatcaaccgcatcaatttgggcatcaggataatgatgcgccatctgaatggcaaggcaaccgcttccggtgcaaagatccaaagcattatgcaccaactcatcgtattctatccaaggacgaagtccgtcacccaacaattcataaataaaagaacgaggtatgattacgcgctcatccacatagaaatcaaactctccctgccatgcctggtgtgtcaaataagcggctggaatgtgttcgacagcacgacgctcaataaccgccagcacttcctctttttcagcttccaagagttttgcatcaagatatggggcaagcatatccaaaggcaaattcaaagtatgcagaatcaaataagctgcttcatcatgcgcattatctgttccatgaccaaaaaagagccctgcctcattaaaacggctgactgcaaaacgtaaaatatcgcggatagtcgtcaattcttgtgctgcctgattaaacataatatgaaccattctgcgtatagatacttttaattataacagaaacaacaagcaaaccttttcatatcgccaaataaccacccaatctacccatacaactacataaatgcccgcgcgaaaaccatcgcccgaacggaaacgacaatggccgacggtatgggcaatctgattggctgggaaaaaacggggcttgttgtcggtaagcagtggataaccgcaaaagacgacaaggtgtccgatgtctgcaatgccaacggcgagatgggcgtaatcgggctttacgagcctttctcacacggcgcattgacgatacccggtcatccgaactgccgatgcgaggttgtttccgtatcgggtggcgaattgggggaatttgccgaaaaaaaggagcttcgtaaagcggctatgcagtatgcgcgggataactttatcggcaaaagctatgtcaataaaaacagcgggcatgaactgaaggtaacttggcaaggtgtgaaacacgctgcgtcaaaggcaaatcaggcggaattatccatcatgacaaaacttgatgacttattgcgctacgcaaaatatgagggttcttattcggataggaaaggtcatcctaatattattgcagcacataagtatcgtgccgttgccaaggttgggaatgagtctttaaatatcggtgtgattgtaagggaatttccagacgaccataaacattacgaccatttcatcttgaaggatgaataaagcccttttgcagtgtcgttctggagcggatagcgttaaggcaagtacacttccagccttgaaaaagggctttaaattcagcatgccatttatacaggcaggagtaaacccatgacaaagttatacgcagaaatcgccaagatggagacgcaggacgacgacacggtcaaggtttggggttacgcttcaagcgaggaaatcgattcggacggcgaagtcatcgcggcggcagctatgaaggcggcgattcccgattatatgaagtttggcgcggggcgcgagatgcacggctcaaacgctgcgggaacggcaattgaaatcaacgtggaagatgacggcagaacctttttcgtggcgcatatcgtcgatcccgttgccgtgacgaaggtcaaaacaggcgtttacaagggcttttccatcggcggcagcgttaccgcccacgatgagttgaacaagtcgcaaatcacgggtttgaagctgacggaaatcagcttggttgaccgacccgccaatcccgatgcggtgtctacctgctttaaggcggacaaaggtgcggaagcggtaaacaacgatacagaacataatgctacatattttagccatttcccttccaaacaaaaaagcaccgacggcggccgatgccctttcctttacaggttcccctattttttatccgcgggcagcaccggtttggctggggcttttggtgcgggcgcgccgaccgaagcctggtccttcagcttcgccagcaccgcagggccgatgccctttaccttggtcaaatcgtctacagacttgaacgcaccgttttgcgcacggtattccgcaatggccttcgccttcgccgggcctatgcccggcagcgcctccaactcctgctgcgaagccgcattgatgtttaccgccgcaagggagaaggcgcaggagaacagcatacagaacagcacgaacattttcttcatggtttttcctttaagggttgcaaacaataaaccgcatcttgcgacgataaaacgagtcattctaaaatgaatatcccaaagtttcaagccgttcctccgcaaacccgaccggacaccgtacggatgccgtcccgccatcaccgacattttttccgggcaaagcaaacattttttccgggcaaagcaaaaacccccgaataatcgggggttttctgaatgggtgtttggcagtgacctactttcgcatggaagaaccacactatcatcggcgctgagtcgtttcacggtcctgttcgggatgggaaggcgtgggaccaactcgctatggccgccaaacttaaactgttacaaatcggtaaagccttaatcaatatattcggtaatgactgaatcagtcagtaagcttttatctcttgaagttcttcaaatgatagagtcaagcctcacgagcaattagtatgggttagcttcacgcgttaccgcgcttccacaccccacctatcaacgtcctggtctcgaacgactctttagtgcggttaaaccgcaagggaagtctcatcttcaggcgagtttcgcgcttagatgctttcagcgcttatctcttccgaacttagctacccggctatgcaactggcgttacaaccggtacaccagaggttcgtccactccggtcctctcgtactaggagcagcccccgtcaaacttccaacgcccactgcagatagggaccaaactgtctcacgacgttttaaacccagctcacgtaccactttaaatggcgaacagccatacccttgggaccgactacagccccaggatgtgatgagccgacatcgaggtgccaaactccgccgtcgatatgaactcttgggcggaatcagcctgttatccccggagtaccttttatccgttgagcgatggcccttccatacagaaccaccggatcactatgtcctgctttcgcacctgctcgacttgtcggtctcgcagttaagctaccttttgccattgcactatcagtccgatttccgaccggacctaggtaaccttcgaactcctccgttacgctttgggaggagaccgccccagtcaaactgcctaccatgcacggtccccgacccggatgacgggtctgggttagaacctcaaagacaccagggtggtatttcaaggacggctccacagagactggcgtctctgcttctaagcctcccacctatcctacacaagtgacttcaaagtccaatgcaaagctacagtaaaggttcacggggtctttccgtctagcagcgggtagattgcatcttcacaaccacttcaacttcgctgagtctcaggaggagacagtgtggccatcgttacgccattcgtgcgggtcggaacttacccgacaaggaatttcgctaccttaggaccgttatagttacggccgccgtttactggggcttcgatccgatgctctcacatcttcaattaaccttccagcaccgggcaggcgtcacaccctatacgtccactttcgtgttagcagagtgctgtgtttttaataaacagtcgcagccacctattctctgcgaccctccggggcttacggagcaagtccttaaccttagagggcataccttctcccgaagttacggtatcaatttgccgagttccttctcctgagttctctcaagcgccttagaattctcatcctgcccacctgtgtcggtttgcggtacggttcgattcaaactgaagcttagtggcttttcctggaagcgtggtatcggttgcttcgtgtccgtagacactcgtcgtcacttctcggtgttaagaagacccggatttgcctaagtcttccacctaccggcttaaacaagctattccaacagcttgccaacctaaccttctccgtccccacatcgcatttgaatcaagtacaggaatattaacctgtttcccatcgactacgcatttctgcctcgccttaggggccgactcaccctacgccgatgaacgttgcgcaggaaaccttgggctttcggcgagcgggcttttcacccgctttatcgctactcatgtcaacattcgcacttctgatacctccagcacactttacaatgcaccttcatcagcctacagaacgctcccctaccatgccggtaaaccggcatccgcagcttcggttatagatttgagccccgttacatcttccgcgcaggacgactcgaccagtgagctattacgctttctttaaatgatggctgcttctaagccaacatcctggctgtctgggccttcccacttcgtttaccacttaatctatcatttgggaccttagctggcggtctgggttgtttccctcttgacaacggacgttagcacccgctgtctgtctcccgaggaaccacttgatggtattcttagtttgccatgggttggtaagttgcaataaccccctagccataacagtgctttacccccatcagtgtcttgctcgaggcactacctaaatagttttcggggagaaccagctatctccgagtttgtttagcctttcacccctatccacagctcatccccgcattttgcaacatgcgtgggttcggtcctccagtacctgttacggcaccttcaacctggccatggatagatcactcggtttcgggtctacacccagcaactcatcgccctattaagactcggtttccctacgcctcccctattcggttaagctcgctactgaatgtaagtcgttgacccattatacaaaaggtacgcagtcacaccactagggcgctcccactgtttgtatgcatcaggtttcaggttctgtttcactcccctcccggggttcttttcgcctttccctcacggtactggttcactatcggtcgatgatgagtatttagccttggaggatggtccccccatattcagacaggatttcacgtgccccgccctacttttcgtacgcttagtaccgctgttgagatttcgaatacgggactgtcacccactatggtcaagcttcccagcttgttcttctatctcgacagttattacgtacaggctcctccgcgttcgctcgccactacttgcggaatctcggttgatttcttttcctccgggtacttagatggttcagttctccgggttcgcttctctaagtctatgtattcaacttaggatactgcacagaatgcagtgggtttccccattcggacatcgcgggatcattgctttattgccagctcccccgcgcttttcgcaggcttacacgtccttcgtcgcctatcatcgccaaggcatccacctgatgcacttattcacttgactctatcatttcaagaacttctttgactttgcctaacattccgttgactagaacatcagacttgaatttcctactttgataaagcttactgctttgttgtgtcttaatcctgccttttgtgtttcaggattaagtcgatacaatcatcacccaaatactgtgtttgttttcttttctcttgcgagagatttttatcctttgcaaagaataaaaaatcaaaacaaacgctttgtctttgtttgttgatttcggctttccaatttgttaaagatcgatgcgttcgatattgctatctactgtgcaaatcaaaacgagctgattattatatcagcattttgttcttggtcaagtgtgacgtcgccctgaatggattctgttccattcttccgttttgatttgtacagtattggtggaggcaaacgggatcgaaccgatgaccccctgcttgcaaagcaggtgctctaccaactgagctatgcccccgttcttggtgggtctgggaggacttgaacctccgaccccacgcttatcaagcgtgtgctctaaccagctgagctacaaacccggattctcttcttaagcgaatcttgccttcactcaagcttcttccgcatctttttcagtttaccgataagtgtgaatgcctaaagcctcttctttctctagaaaggaggtgatccagccgcaggttcccctacggctaccttgttacgacttcaccccagtcatgaagcataccgtggtaagcggactccttgtggttatcctacctacttctggtatcccccactcccatggtgtgacgggcggtgtgtacaagacccgggaacgtattcaccgcagtatgctgacctgcgattactagcgattccgacttcatgcactcgagttgcagagtgcaatccggactacgatcggttttgtgagattggctccgcctcgcggcttggctaccctctgtaccgaccattgtatgacgtgtgaagccctggtcataagggccatgaggacttgacgtcatccccaccttcctccggcttgtcaccggcagtctcattagagtgcccaactgaatgatggcaactaatgacaagggttgcgctcgttgcgggacttaacccaacatctcacgacacgagctgacgacagccatgcagcacctgtgttacggctcccgaaggcactcctccgtctccggaggattccgtacatgtcaagaccaggtaaggttcttcgcgttgcatcgaattaatccacatcatccaccgcttgtgcgggtccccgtcaattcctttgagttttaatcttgcgaccgtactccccaggcggtcaatttcacgcgttagctacgctaccaagcaatcaggttgcccaacagctaattgacatcgtttagggcgtggactaccagggtatctaatcctgtttgctacccacgctttcgggcatgaacgtcagtgttgtcccaggaggctgccttcgccatcggtattcctccacatctctacgcatttcactgctacacgtggaattctacctccctctgacacactcgagtcacccagttcagaacgcagttcccgggttgagcccggggatttcacatcctgcttaagtaaccgtctgcgcccgctttacgcccagtaattccgattaacgctcgcaccctacgtattaccgcggctgctggcacgtagttagccggtgcttattcttcaggtaccgtcatcagccgctgatattagcaacagccttttcttccctgacaaaagtcctttacaacccgaaggccttcttcagacacgcggcatggctggatcaggcttgcgcccattgtccaaaattccccactgctgcctcccgtaggagtctgggccgtgtctcagtcccagtgtggcggatcatcctctcagacccgctactgatcgtcgccttggtaggcctttaccccaccaactagctaatcagatatcggccgctcgaatagcgcaaggcccgaaggtcccctgctttctctctcaagacgtatgcggtattagctgatctttcgatcagttatcccccactactcggtacgttccgatatgttactcacccgttcgccactcgccacccgagaagcaagcttctctgtgctgccgtccgacttgcatgtgtaaagcatgccgccagcgttcaatctgagccaggatcaaactcttatgttcaatctctaactttttaacttctggtctgcttcaaagaaaccaacaggacaatgttcaaaacattatcttgtctgtctttcaaacagtgtgagactcaaggcactcacacttatcggtaatctgttttgttaaagagcgttgcgaattataaagtattccttccgcctgtcaagatatctctcgatatccccaacattctgtgctatacttttcagttcgtccgccacttctgcagcagcgaagaaccgaactatacgcccacagggaaaaacggtcaatgctttcagcgggatttttttggggaaattcgtcatgtcgctgtcggataaggttttttatttctgctaaatactgcgccgcctccaacaatcctttcctctccctcctccggctggtgcgcctttgtgaatatgctgtctgaaactcggggactcagacggcattttgtatccaaacggtatctaatgtatccgtactttgttatagaatggctgctgttttttcttcgtaattagaaattgtcaaaatgggcaaacatattcttttaggtgtaacgggcagtattgcggcgtataagtcttgcgagttggtgcgactgctgaaaaaacaggggcattcggttacggtggttatgagccgctcggcaactgaatttgtttctccgctgacttttcaggctttaagcggcaatcctgtcctgaccgacacgcacggcggcaacggttcaaacggtatggaacatatcaacctgacccggaatgcggatgtttttctgattgcgccggcaagtatgaataccgtggcaaaaatctgtaacggcgtggcagataacctactgaccagtctggcagccgcacggaaatgtccgcttgccatcgcgcccgcgatgaatgtggaaatgtggctcaaccctgccaaccaacggaatatcgcacaactggtttcagacggcattactgtctatatgccgggcttgggcgaacaggcttgcggagaaaatggtatgggaaggatgccggaacctgccgaattgctggatctgcttccggatttatggacaccgaaaattttaaagggcaaaaaagtcttgattaccgcaggtgcgacatttgaagccattgaccctgtccgaggcatcacaaatatctccagcgggaaaatgggcgtggctttggcgcgggcgtgccgtgccgccggtgcagaagtcagcctgattcacggacagcttcaaaccgcgctgcctttcggcatatccgatacggttcaagccgtcagtgccgaaaatatgcatcgcgcagtgcatcgtttaatcgacaaacaagatgcttttatttctgttgccgccgtctcagactatagggttaagaataggagtactcaaaaattcaaaaaagataaaaatgccaaaccgttatccatcgaattggatgagaaccccgatattttggcttctattgcctcattaccgaacccgccgttctgcatcggttttgccgctgaaacggagaatgtaatgacatatgcgcgggaaaaacgtattaagaaaaagctaccgatgatcgttgccaatgatgtttcaatcgcaatgggcaaaccgaccaaccggattaccattatcggggacgacggggaactgtcttttcccgaaacaagtaaagatgaagcggcaatgcggattgttgaaaggcttgccgtatatttgagcaaataagcaattgaacggataaaccataaaacgggttgcctgttaatcaaaaggcaacccgttttacctgcttcaacttctgatgactttgcggatatatggaatactatgcagattttgaataatctgattcaattgattcagattcttgactttcaataagaatttgaattcgacaaaaccttccgttcccgactgggatttagacggtgtttcgaccgactcaatgtctgcaccggaatcggaaatcgcttgcgccattaatgccaacaggccgtggctgtcttccgattggacttgaagcccgacacggtagttctgcccgttcatattttcccagtctgcatccagctgctgttcgggatcggacttcaacaacgtcgggcaggtatccctatggataatcatgccttttcccttaaccaacagcaaacggatggaatcgccgggaacagggtggcagcactctgcaaaatgaatatgcccgctttcctgcccatcgactttaatggaactgagcctgacctcgctgccgaaatgctcccctgccaactcggcaatgtgcatggcgacataaacaggcagggtatgccccatccctacgttgtacagcacttcttcaaacgatgtctgcttgtcgttgagatcggcaagatatttttccttgatgccgtctgaaagcaggacatctttgggcagcaaactggacagggctttttgtaagaggctctctcccaaaacgaccgcatcgtgccggttaaggtttttaatatattggcgtatggcgctgcgcgccctgcctgacacggcgaaattcaaccacgcgggattgggtttggcgtgttcggatgtgataatttcaacagaatcaccggttttgagcttcgtacgcaacggcatcatgatattgttgatacgtgcggcaacggttttgtgcccgatatcggtatgcaccgcataagcaaaatcgacaggcgttgcccctttgggcaaagttaggatttttccttttggcgtaaggatgtagatttcgttcggaaacaaatcgactttgacgtgttcgagaaactcaatggcattggcactgcttgcctgcaaatctaagatatttttcagccaccggtttgtgtgaagcaccgcctgatcgaccgtcttagaatatgatttatagctccaatgtccggcgattccaccttcggcaacagcatccatttccttggtacgtatctgaacttcaatcggcaagccgtaagggccgaccaaagtcgtatgcagactttgatacccgttgcttttcggaatggcgatatagtctttgaaccgcccgggcttgggctgatagagggtgtgcaatgcgccgagtgcggcataacaggctggaatgctgttgacaatgacgcggaaaccgtaaatatccataacctcggcaaagcgcagctttttcgccatcattttctgatggatgccgtacaggtttttttccctgcctttgattttggcctctatattcgcgcctaccagccgctggccgaatgcgcgcaagactttgccgacaacgtcctgccggttcttccggctcttgtccatcgctttttttaaagtctcgtagcggttgggatgcaggttttggaacgataaatcctgaagctcttgatatgcgttattcaaacctatacggttggcaatctgtgcatagatttcaagggtttcccttgcaatccggcggcgtttgtccgggcgcatcgaaccgagcgtccgcatattgtgcaggcggtcggcaagtttgacgacaatcacgcgcacatctttggtcattgccaaaatcagtttgcggaaactctccgcctgatgctccgcatgatcttcaaatttgagtttttcaagcttggacagaccgtccaccatctcggcaatcgtattgccgaacaccgccgccatttccccttttgtcacgcccgtatcttccaatacgtcgtgcatcacgcctgcacaaagaccctgtatgtccatatgccaaagggcgagctgcgtcgcaacggcaatcggatgcgtgatgtagggctccccgcttttgcgggtttgcccgtcgtgggcgcgaaacgcataggcgacagctttttcaagctccgcctgttcctcgggcttgaggtaggaggcggtatggaaaagcagggcacgcgcttcggcggtcagggggtcgtaaggggcggaaggttggggggcgggcatttcagacggctttcggtatgtatgtgtttttcatttcaaaccgtcggactgcacggcggcaaagtgttccggcgtgcgtttccggcagaatttatttattgcgcgtcaacagttctgtaccgatatgtccggcggcgatttcccttaaggcggtaacggtcggtttgttattgcggacatcgtccacaagcggcgtgttgccgttctcaagctggcgggcgcggcgagccgctaccaatgtcaggtcaaaatggttggaaatttttccggtacagtcttcggtggtaatacgtgccatattatttgctttctttcaaaaatatttaaattgggaaaccgggtattttcgccgttttctaggaattttccaacaaatctgcaataaaccccagttgccgcgaccttttcagacggcaggcattcacaatatggcgcaaatcctcctccgctcgcgccaagtcgtcattgaccacgacaaagtcaaacaatacggactgctcgatttcatgccttgccttcgacagcctcctttggataacttcccgactgtccgtcccgcgtccgttgaggcgcgcggcaagtacgtcgaaagaaggcggcaggataaagatgccgacggcttcgggcagcgcgtcgcgaacctgcgccgcgccctgaacgtcgatttccaaaatcacgtcatagcctgccgccgccaacgcattcacaccctccgcgcctgtgccgtaatagttgccaaatacgtcggcgtattccaaaaaagcttcctgcgcgataagcgactcaaactcttctttggaaacaaagtgataatgtacgccgtttgcttcgccttcacgcggcgggcgcgtcgtgtgcgacacggaaacgcgcaaaccgttatggtttgccaacagccgcgacaccagcgtggttttgcccgtgccggaagcggccgaaatgataaagatgttgccttttcgataagcggacatattttttacctgtatattttccagccgattgtatcacaatggacacccagtttcctatttgccgatgcccatattttgccgctattgttttgattgatttggcaagcgacaggctgacggctacaatatggcgttaaaaacatcaaacttggaacacgcaatgctggttcatcccgaagctatgagtgtcggcgcgcttgccgacaaaatccgcaaaatcgaaaactggccgcaaaaaggcatcttattccacgacatcacgcccgtccttcaaagcgcggaatacttccgccttttggttgatttattggtttaccgctatatggatcagaaaatcgacatcgttgccggtttggacgcgcgcggcttcattatcggcgcggcactcgcctaccagctcaacgtcggtttcgtccccatccgcaaaaaaggcaagctgccttttgaaaccgtatcgcaaagctacgcgctcgaatacggggaagctgcggtggaaatccacaccgatgccgtcaaactcggttcgcgcgtgctgctggtcgatgatttgattgccacgggcggcacgatgcttgccggactggaactgatccgcaaactcggcggagaaattgtcgaagccgccgccattttggaatttaccgaccttcaaggcggcaagaatatccgtgcaagcggcgcgcccttatttaccctgcttcaaaacgaaggctgtatgaagggctgaaaaccgaccctgccgtctgaaaccggcagggttgttatgatgcgttcaaatcacgcccaaatcttgcaagcccctcaacacgccgtcttcatcaacgctggggcaaacatatttcgccgcttctttcgccgcctgttccccgttgcccattgccacgccgaacccgacttctgacagcatttccacatcgttcaaaccgtcgccgaacgccatcacgtctgccatttcccatcccaatgcttcaaccacgcttctgatgccgtccgttttcgacgcacccgcaggcagcagatcgaccgcttcctcgtgccagcgcaccgttttcaagccttcccgttccacaatatccgaccaaagcggcatttcgttttcctccgcaaacaccagcatctgatacaccggtttgcttgaaaaataatccttatcggcaaaaaaatcgctggcgatatgcttcaaggcgcggcacacgcattccgacagcgcggacacagcgatcccctctccgccgacaaacgcataatccatgcccaagccatccaaatgcgcgcaaaccctgcccatcaaaccggcatccatcggtacttcgcgcacggtttttccgtgcagcagcgcaaactgtccgtttatcgttaccacggcatccattcccgcttccgccatcatatccctgaccttttcgggaatcgtcgccaaagaccgccccgttgccaacgccgtcaatatacctttgccgcgcaaagccgccaccgccgttttcacggaagggcgcaaagtatccgtatattttcggtacagcgtatcgtcaatgtcgaaaaacacgattttaggattcatcacattctctctcgcattcaaactaccgcattatatcccaagcaggcaaatacttgataaatccttataaatttcccgtcaaaattgaccgaaaatacaaaaaggcggataatccgcccatcctcaaacccttttcagacggcatttgcagcaatgccgtctgaaacatttttacaaagcatacaaatcatgtttcaacacacaggacgacacataaagcgtcgccctatatgttgccctgattcggaaggggttacgcccctcccaaataaagtctgattctactgccctaaagggcggggtttcaaccgaaaaggaaacacgatgaaagcacccgaactcttattgcccgccggcggattggaaagaatgcgcgccgcctacgactacggcgcagacgccgtttacgccggcagcccgcgttactcactgcgcgcccgcaacaacgaatttgccaaacttgatgttttagaacaaggcattaaagaagcgcacgagcgcaacaaaaaattctttttaaccgtcaacaccctgccgcacaattccaaactcaaaaccttcgttgccgacatggagccgctgattgccatgaaacccgacgcgctgattatggcggatccgggtttgattatgaccgtgcgcgaaaaatggccggaaatgccgatccatctgtccgtacaggcgaacaccaccaactattggggcgtgaaattctggcaaaacatcggcgtcgaacgcattattctgtcgcgcgaattgagtatggaagaaatcgccgaaatccgccaagaatgccccgacatcgaactcgaagtcttcatccacggcgcattgtgcatcgcttattcaggccgttgcctattgtcgggctatttcaaccaccgcgaccccaaccaaggcacctgcaccaactcctgccgttgggattacaaggttcacaatgccacggaaagcgatgcaggcgatgcccagcttctgcaaggtttcaactttgaaaaagcccaagaagaagccaaccaaaactttgaaggcatcaacggtcaaaaacgccatccctacgccgacaaagttttcctgattgaagaatccaaccgcccgggcgaaatgatgccgattatggaagacgaacacggcacctacatcatgaattccaaagaccttcgcggtatcgaagtcgtcgaaaaactcgccaaaatcggcgtggacagcctcaaagtcgaaggccgtaccaaatcgctctattatgttgcacgcgtcgcccagtcctaccgcaaagcgattgatgatgccgtcgcaggccgtccgtttgattacagcctgttgagcgaactcgaaggcctcgccaaccgcggctacaccagcggcttcctcgaacgccaccaaactcaggattatcaaaactacctgaccggccattccaccgccaaacaaagccaatacgtcggacacgttaccgaaatcgatgaaaacggctgggcaacagtggaagtcaaaaaccgctttgccgtcagcgattcactcgaaatcatccacccgagcggcaaccaaaccatcaaattggaacaaatgacccgcaaaggccagcctgtcgatgttgccccgggcaacggcattcaggtcaaaatccccaatatgcagggtaaagaaaaagccctcatcgcacgcgtgttgaacccctaagccattatgccgtctgaaacatttttcagacggcatttttaatccccttgccttattgtgcggcagattcagatcgggacacacctatagtccacgacagaagtctggcttttaagcgaagacaataaccgaaaagaccgcctcggcggtctttcttgtgtacacagtttttgtatttgtcagcttgatgcgttgacaactctaattccatattgcggaatatattcatcgacagtcatcagttcaaagccttccgcttgggtttgtgcaatcaacatcctatcgaaagggtctttgtgtatctccggaaggcttccagcctgttttgcatgaaacagacctataggcaacatttcaaaatcctcttcttgaagcacatcaaaaaactcttccggtaatttcaacaaccccttgttctgcttgatggaaatttcccaaatacttgctgcactgacaaagatcgcatttctcggattttctatcagtttgcgtgcagatatccccagtttcttgtcatccaacaaccaccacagcaacgcatgggtatcaagcagaatctttctcacagagccgactcctcaaaaaataaagctgccgtttcattgtcatcctcaagaatacgtgaaatatccgtattttccatatgactgaattttttcaaccttcctgcatttcgtgccggtttttcaataccgattagttggacgcaaggcttacctgccttcgcaataataacgatttcccctgcttctgctctttgaatcaattgactcaaattggtttttgcctgatgaatatttgcttgaaacataacacttctcatgattagctaacttgactaatatacatcattaccaagattttgggaatctcattacatatatttgattatatccgccgttttattcacaccttgctatttatagtggattaacaaaaaccagtacggcgttgcctcgccttagctcaaagagaacgattctctaaggtgctgaagcaccaagtgaatcggttccgtactatctgtactgtctgcggcttcgtcgccttgtcctgatttttgttaatccactataaaacggctttgcggtatcccagtttgacaccggttacttcctgattggtaagcatcattattttcccataaatcaaacgtctgacacggcattataaacacaatgcggcatctgccgccacccttgcggacgcggcgttaccggcttccacagctacttcgacaagcagccgctgcaaggcggacaatacgactgtcaggcaggctcgttccacgtccgcgtggtcatgcgcgccaacgtcgtccgttaacatatcggcaaccaaaaaatgccgtctgaaacatttttcagacggcatttttaatcctgcaacattaccccctgcctgagttcggatactgtatcaatataaaaccccatcacacagatttacggtaaaaagccgtccgaatgaattcttgaacacaattcggacggctttaattttcaacaaggcgattaattcaataataccagattaaaacttccattccagcgatacggcgtaattgcggcctggggcgcggtagcggtctaagcctttgccatcgcggtcgaccgcattggtggtgctgtagctatataaaccgcgcagggaatcccaagtggtgtatttgcggttgaacaggttgtacacgcctgcacgcaaagtcaggtttttagccggtttgtagaagccgtacatatcaaacacataagccgacttgttcagccacgggtaatcttttacctttttctgcaaaggcgtaccccagcccttgttttcataaacggtgtattgcgcgtctttgacctttttcgcgcctagataggtcaggcgggagaatacgccccatttttcgctcggactttcatagtcgataccggcaatcactttcagcggctgtgtggacagcaggctgttgtcgcccgacagtttgcttttcgcataacccagcgagccgaacagtttccaaccctcaggaacaaaagacgctactttgtccacattcagacggcctgtcagctcgataccgcggattctggccttgtcgatatttttcatctgccaatccagtttttctttgtaggggtcgctgcatataccgtagtaagcattttcctcagtacagccgggagtgccgctggtggtcagcttctgctcttcagacaggaaattgcggtaattgctttgatacaggttggcatccagcatgcctttttcgctgcggccttgcagagacagggtgtgggtggtgctgcgctcggctttcaggttgggattgggcagccaattacccgaaccgtggttgtaagtgaaatacacttcggacgcattggggacacggtagccggaagtaatgtcgtaaccgacacgccaagcctgattcagttgcgccgccaagccgacaaaaccgctccagcctttataagtgttggctgcaggtggtgttttgtcacaagcatgacactcggcattcaattcctgaggcgtcattttggtgtggtcgtaacggatacctgcgcggctactgaacacgtcgttccattgaatttggtcagacagtgagaaaccgtagttggtggttttcaccggatgctggatactgctggtggttcgaacaacacggccgctgaagtaataatcgtcgcggtttaggttttcaaaatcacggcggctgacgaaagttttaaacgacaggcggtgtcgcccccccccgagttgcaacggatggctgtccaaacgcaaagtaaaacgtttgaatcgggtgtccatgctgcggttgtatatttcgtccaaatccttctgattatagttgcgcgtccaggtggaataatccatcgggaacgagcctttgttgttaaccgccgccactttggttttctgataatcgaagtccgccttcaaagacgacaaccaatttgaatcaggcatccattcgtaaaagaggttggcattgcgccgtctgtttacgtcatcggcttcgcgccaggaagaagcggtcaggttataagactcttcaaccgtgtaattatgtccctgctggccgttaagcgatgcgccgatgcggtggttatcgttaatttggtaagcaatcttacccaaaaagctgtggtatttgtgtttggacgaatcagggataccgcgtgccgaaccacggatattcgcgccactgccttccccttccacagcatagcctcggtttcccgcactttcggtttcatgaccgcgacgttgcgaatacagcaaagcagcatccacgcggtcgttactcacaccgaaaccgagagtatttgtccattcacggttacgcgtgctgtaaccgtttttcatcatcacgccgaattgcctgtcgtccaacagcaaatcacggccttgcagcgtttggtaattcacaccgccgcccaatgcaccactgccggtattgaaagagtctgcgcccttcacgatttcgatgttgcgcacgagttcggggtcgatagacaaacgcgagctgttgaagttgccataacgggcgtacagcgagttttcttcagaatcaggcaggtttacaccgtctatgctcacgccgacacggttgccttccacgccgcgaacagcaaagcctttttgatggcggccgctgtcgctcaagccgacatcggtggaatagcgcaccaagtctttattgtcgcgtatcatttcttgtttgatacggttaaggttgacgcgttccacagccgcaggcgcattgcgctgacctttaacgcgcactgcttttatctctgccttaacgggtgtggtttcagttgcagcttcatctgctgccaagaccggattgccgaaaatactgccgaccagcgcggcgatagggagcatttgtaatggtttcatattatcaactcaagatgtatggattgttcatccatcggttagcgaataatagattttatgataatcattaatatttaataagacagtaatccatgtaaacaaagccgcgccgtgtaattaaaggtccctgcaaacagctatgccgagaccttgtttatttggttcgattcttgtttatttggttcgattattttttagtgcctgtgcggcatcattccttccggtgcttcggcatcggctgccaagccgaaggtttcgcgcaacacgactttgtagaatgcaaaggcttcgcgcgcgccttggatggcttccgcttcggcttcgggagtcaggttcaaagcgttcagatgctcgacgaaagcgcgccagtgtttgccgcgcccgtcgggatggggtgcgaggtggcgcgcgccgtgttcgccgttgtaatcgagtttttgggcgtgtttgaacaaaaatgccgcgcccaaattggatccttcggcgcaataaagccagccgattgctttgttgccggtttcatgcggcagcggtttgccgtattcgtaaggtttgtcacccaaatctgcaaggtcttgcgttacggcatcgtatcgcgccatgtattccagctcgggaatggctttgtttaattcggcatctttatagatgtggtcgacagccttgtggaaaacggattggagtttcaaaaatttgatgtagttttctttgctgacaaacggttggacagacataacgaggttatccacgctgtcgtgaaccgccgtggtatccgccttcaagcgtttggcaaatgtcaatgcttgattttcggtttcactcatattttttcctttgtcggtaagggataaggatgcggtgcgggcaaaatccgcacttgcccgcatatatagtggattaacaaaaaccagtacggcgttgcctcgccttagctcaaagagaacgattctctaaggtgctgaagcaccaagtgagtcggttccgtactatttgtactgtctgcggcttcgccgccttgtcctgatttttgttaatccactataaaaataataaagaatcataaacgaaatttattatcacatatttttggaaaaaatatcatttgcgtgatgtttttaagcaggtattttactattctttacagaatcgggattttatcaaatgggttcggcagtcggcggacaaccgctcaaaaaatatttttgccggacaccaagggtttgttcatactgccgaacctgccggttttgcatcctgattgggtgtatcgccttttttcctttataatgccgccacttatatttgccactttcccgatgaagccgtttgccgaaaatatcccccacagccttcgcggcaactgctgcgacgaagccctgccgccgcatacggtagattgtccggaatgcggctgccgcgcggatgtaccccggttggacagtggagaagcggcgttctgtccccgttgcggacacaaactcttcagggtgggcaggcatcctttttccgccccgcccgcctatgcggcggcttcgctgattttaatggcgtttgcttacggtatgacgtatatcgaggtcgggataccgggtgcggcatccgtcctttcgctgcccgagatgatgcgcctgatggtgtttcaggattatggttttttggccgaagtgatgtttgtgctgactttcggcgcgccggttctgtttctgctgctgtgcctgtatgtctatgccgcgctgatacggaaacaggcgtatcctgcgctgcgtttggcaacgcgtgtgatggtgcgcttgagacaggcgatgatggtggatgtgttttttgtttccactttggtggcgtatatcaagctctcgtctgtggcagaggttcgcttcgggccggcgttttatctgatgttcgcgctgtcagttatgctgattcggacttcggtatcggttccccagcattgggtgtattttcaaatcgggcggctgacgggggataatgcggttcagacggcatcggaaggtaaaacctgttgcagccgctgcctgtatttccgcgacagtgccgaatccccctgcggcgtgtgcggtgcggaactgtaccgccgacggccgaaaagtctgagtatttcgtcggcgtttctgacggcggcggttattttgtatttccctgccaatatcctgccgattatgatttcgtccaatcctgccgccacggaggtcaataccatccttaacggcatcgcttatatgtgggacgagggcgacaggctgattgcggcggttattttcagcgcgagtattttggtgccggtactgaagattgcggcaatgtcggttttgattgcgtccgcccgcttcgctttgccaacgggtgcaaagaaattgtcgcacctctaccgcatcaccgaagcggtcggccgctggtcgatgattgatatttttgtgattattattttgatgtgttcgttccacacttatgccgcgcgcgtcattccgggcagtgcggcagtctatttctgcctggtcgtgattctgacgatgctgtccgcctattatttcgacccgcgcctgctttgggacaaacgcgcttcagacggcattgctttcaatgaaacggaaaaacatgactgacaacagccctcctccaaacggacacgcccaagcacgcgtccgcaaaaacaacaccttcctctctgccgtctggctggttccgctgatcgcgctgattgccggcggctggctttgggttaaggaaatccgcaacagggggcctgtggttacgctcttgatggacagcgcggaaggcattgaggtcaacaatacggtcatcaaagtattgagcatcgatgtcggacgcgttacccgaatcaaactgcgcgacgaccaaaaaggcgtggaagtaaccgcccaactcaatgcggacgtatccggcctcatccgcagcgatacccagttttgggtggtcaagccgcgtatcgaccaaagcggcgtaaccggtttgggtacgctgctttcgggttcgtacatcgcctttacacccggcaaaagcgacgaggcaaaagacgtgttccaagtgcaggacattccgcccgttaccgccatcgggcaaagcgggctgcgcttgaatttgattggtaaaaacgaccgcatcctcaacgtcaacagccctgttttgtatgaaaattttatggtcgggcaagtcgaaagcgcgcatttcgacccgtccgaccaaagcgtgcattacaccatcttcatccaaagccccaacgacaaactgattcattccgccagccgtttttggctggaaagcggcatcaatatcgaaaccacaggcagcggcatcaaactcaattccgcccctctgcctgccctgctgtcgggcgcgatttcatttgattcgccgaaaaccaaaaacagtaaaaacgtcaaaagcgaagacagcttcacgctttacgacagccgcagcgaagtcgccaacctgcctgacgaccgctcgctgtactacaccgcgtttttcaaacaatccgtgcgcggcctgaccgtcggttcgcccgtcgagtacaaagggctgaatgtcggcgtggtttccgacgttccttatttcgaccgcaacgacagcctgcacctgtttgaaaacggctggatacccgtacgcatccgcattgaaccttcccgtttggaaatcaatgccgacgaacaaagcaaagaacattggaaacaacaatttcagacggccttaaacaaaggcctgaccgccaccatctccagcaacaacctgctgaccggaagcaaaatgattgagttgaacgatcagccttccgcatcacctaagctgcgaccgcataccgtttatgcaggcgataccgttatcgcgacccagggcggcggtttggacgatttgcaggtcaaattggcggatttgctggacaagttcgacaaactgcctttagataagacggttgccgaattgaacggttcgcttgccgagctcaaatccacactcaaatctgccaatgccgccctaagctccatcgacaaactggtcggcaaaccgcagacacaaaacattccgaacgaactgaaccaaaccctgaaagagttgcgcacaaccctgcaaggcgtatcgccgcaatcgcctatctacggcgacgtacaaaatacgctgcaaagtttggacaaaactttaaaagacgttcaacccgtgattaatactttgaaagaaaaacccaacgcgctgattttcaacagcagcagcaaagaccctatcccgaaaggaagccgataatgcgccttttcccgattgccgccgccctgtcgcttgccgcctgcggtactgtgcaaagcacacaatatttcgtgttgcccgacagccgctacatccgtcctgcaacgcaaggcggcgaaactgccgtcgaagtccgtcttgccgaaccgctcaaacgcggcggactggtctatcaaaccgacccctaccgcctcaacaccgcacaaaaccacgtctgggcagacaccttggacgatatgctcgaagcggcgttgagcaatgcattcaaccgtttggacagcacacgcatctttgttcctgcctcacgcagcggcagtaccgaaaaatggacggtctatatcgacgcattccaaggcagctacacgggcaaaaccctcatcagcggctacgccgtcctacccgacggtacgaacagacccttccatatcgaaaccgaacagcagggtgacggctacgccgcgatgaccgccgcactcgaacagggactgaaacaggcggcgcaacagatggtcgagtaaaccgtgaactattgcgaatttgccgcctcacttcccgaaaacaccgataacccgaacaaacattaccacgacacgcaatacggttttccgattgaggacgacaatgaattgtttgagcggctggtgttggaaatcaatcaggcaggattaaactggacgctgatgctgaagaagcggcaggcgtttcagacggcatttgaaggtttcgacatcgatacggttgccgccttcgacgacaccgaccgcgaacgcctgcttgccgacgcgggcattgtccgcaaccgcctgaaaatcgatgccgccattttcaatgcacggcaaatccaagcgttgcaacaagaatacggctcgttcaagaactggctcgacacgcaccatccgcgaagcaaagacgaatgggttaaactctttaaaaaacatttcaaattcgtcggcggcgaaatcgtcggcgaatttctgatgagtaccggctacctcaaaggcgcgcacgccgaaagctgtccggtttaccgtgaaaccctgaaataccacccgaaatggctcgatgccatctgaaaaaccaatgaacagaagaaccttcctcctcggcgcaggcgcgttgctgcttaccgcctgcggcagaaaatccgcccgaacccacgccaaaattcccgaaggaagcaccgtacttgccttgggcgattcgcttaccttcggctacggcgcaaaccctggcgaatcctaccccgcgcaactgcaaaaactgacgggttggaatattgtcaacggcggcgtatcgggcgatacatctgcccaagccctgtcgcgcctgcccgcgctgttggcacgcaaacccaagcttgtgattgtcggcataggcggcaacgactttctgcgcaaagttcccaaggagcagacccgcgccaatatcgcgaaaatcatcgaaaccgtgcagaaggaaaacatccccgccgtcctcgtcggcgtgccgcacatcacactgggtgcgttgttcgggcatttgagcgatcatccgctgtatgaggatttgtccgaggaatacggcattccgctgttcggcggcgcgtgggcggaaattttgggcgataataatctgaaatccgaccaaatccacgccaacggcaaaggctatcggaaatttgccgaagatttgaatcaatttttgagaaaacaggggtttagataaacaaaggtttatccgcacccaagttgtttatataatcatgaaccgactgggacaccaaactgcttcgggacgcatatgccgtctgaagtgcaaagcctacgccatacagccgcatgaagttgcagcggtatggcgttttttgaaaaagacggcctgccggttcagacggcatgaccgaccgtccgagcctgctgtggataaagcccggacaggctgaaatcatggaatattgcgaacctgaagaagcatccgacccgtacgcaacatacaggcgtgccaacctgatggcgggtctgccgctgtttgtcgtgattttggttctgctcaatattgtttttccgcttccggcgcatcccttagcttggctggtgcctgcaggtttcatggttttgggcggcggctttcccttatcgctgccgcttgtggcgctgcttgtcctgacctgctgcattctggcgcattgtccgccattatcccgtcttttgtgctacccttgcccgaatcatccgatgtctaaaaattctgcctgatggcagccctacaaacccgaaggagtagaaatgaaactgtccgaactgttcaaccccgacgaatttgccgcgcggcatttgagttttggcgacgaagcggcgttgcttgccgctgtcggcgagaaaagtatggacgattttgtcggcaacaccgtgccgcaaagcatccgtatgccgtctgaactcgatttgcccgatgccctgaccgaagcggacgcgttggcaaaattgaaaggcattgcgtcgaaaaacatgatcaacaaatcctatatcggtttaggctattacccgacccgcgtgccgaacgtgattttgcgtaacgtattggaaaatccgggttggtacaccgcctacacgccgtatcaggcggaaatcgcgcaggtcgtttggaagctttgttgaacttccaacaagtgtgtatcgatttgaccggtttccctgtggcgggcgcgtctttgctggacgaagcgaccgccgccgccgaagcgatggcgatggcgcaccgcgtgggcaaggtaaaatccgagcgtttctttgtggacgagcgcgtgtatccgcaaactttggacgtgatgaaaacccgtgccaagtatttcggcttcgagctggtggtcggcgattttgcccaagccgacgaaggcgaatacttcggcgcgctgttccaatacgtcggcaaagacggcgacgtgcaagacttgcaggacgttatcggccgtctgaaagccaaaggcacgattgtcgccgtttccgccgacatcatgagcttggttttgctgaaaccgcctgccgaattgggtgcggatattgcgttgggcaacacacaacgcttcggcgtgccgatgggcttcggcgggccgcacgccgcttatttcgcgtttaaagacgagttcaaacgttccgccccgggccgcatcatcggcgtatccaaagacgcatcgggcaaacctgccttgcgcatggctttgtccacccgtgagcaacacatccgccgcgaaaaagctacatccaatatttgtaccgcgcaggcattgctggcgaatttggcgggtatgtatgccgtttaccacggccctgaaggcgtgaaacgcattgccaaccgcattcacgcgctggcttctgcctttgccgatgcgctggtttcagacggcctgaatgtggttcacaaagtctttttcgatactgttaccatcgattttggcagtaaagagaaagcagaccaagtgtttgccgctgctttggcgtcgggttacaacctgcgccgcgtcaacgatactcaagttgcggctgcattccatgaaacatcggcatacgaagatttggtcgatttgtaccgcgcgtttaccggcaaggatacgtttacatttgccgatgatgtcaaaggccgtctgaacgccgaattgctgcgtcaggacgacattctgcaacatcctgtgttcaacagttaccacaccgaacacgaaatgttgcgttatctgaaaaaactcgaagaccgcgacttggcgatgaaccgcagtatgatttcattgggcagctgtactatgaaactcaacgcgactgcggaaatgttgccgattacttgggccgagttcaccgacatccatccttacgctcccgaagcgcaaaccgccggctaccgcgaattgctcgccgatatggaaaacagcctgaaagccatcaccggctttgacgcgatttccctgcaaccaaattccggcgcacaaggcgaatacaccggtatgctcgccatccgccgctatcaggaatcccaaggcgaagcgcaccgcaacatctgtctgattccaaaatcagcccacggtaccaaccccgccaccgccgccatgctcggtttgaaagtcgtcgtcgtcgacaccgacgaacacggcaacgtcaacattgacgatttgaaagccaaagccgagcaacaccgcgacgctttgtctgccatcatgattacctatccgtccacccacggcgtgtacgaagaaggcatccgcgacatctgccgcattattcacgaaaacggcggacaggtttacatggacggtgcgaacctcaacgcccaaatcggcatcatgcagcctgccgaagtcggtgcggatgtgttgcacatgaacctgcacaaaaccttctgtatccctcacggcggcggcggcccgggcatgggtccgattggcttgaaagcccatttggctccgtttgccccgggccataccttgaccgacacccacaacgcggctgccgatcaaaccgccgtggctgccgcagcatatggttctgcatccatcctgccgattacttggatgtacctgaccatgatgggcaaacaaggcatggaacaggcaacgcgctgggcattgctcaacgccaactacgtcgccaaagccttgggcgaggattatccgattctctacaccggcaaaaacggccgcgtcgcgcacgaatgtatcgtcgacttgcgtccgctcaaagccgaaagcggcattaccgaaaccgacatcgccaaacgcctgatggactacggcttccacgccccgaccgtctccttccccgttgccggcacgctgatgatcgaaccgaccgaaagcgagagcaaagccgaactcgaccgcttcatcgccgccctgaaacaaatcaaacaggaagtgctgaaagtcgggcgcggcgaatggccgaaagacgacaacccactggtcaacgcgccgcacaccgccgcagatataaccggcaactgggcgcatccgtattcccgcgaagaagccgtcttcccgttgccgttcgtccgcgaacacaagttttggcccttcgtcaaccgcgtggacgacgtgtacggcgaccgcaatctcgtgtgcagctgcccaccgatggaaaattatgaagactgactgttgatatcttaaaaaatgccgtctgaaacattttcagacggcattttcatcaacggcaaaccagttgcaccaatacacgtatctcgactataactttaaaacaaatgagttaaaccagtatccatacatcagcttttttatcatcctactttttattcatccgatcgtgcaaacagatttcaaagatgaaaagcctattcacaccctttgatgtcatttccacacggacaaacaaatatagtggattaacaaaaaccagtacagcgttgcctcgccttagctcaaagagaacgattctctaaggtgctcaagcaccaagtgaatcggttccgtactatttgtactgtctacggcttcgtcgccttgtcctgatttttgttaattcactataaattcccataaaaaaacggagcagatacctgccccgtttttatttaatccgaaattttaatctaaatttagaattttgcaccggattggtttgccatatagtcaacagccgctttgacttcgtcatcgctcaaacctgcattgccgcctttggcaggcatcgcgttaaagccttcaagggcgtgtttgtgcaaggtttctttgccttttttgatacgcggtgcccaatcgtcttttttgcctatgccgggaataccgggaatcgaaccgccgtggcacacctgacaggttgcttcgaagacttttttaccgtcaacgccgaccgcaggggctgccgcacccttgtcttctgccttcgcttctgccggagctgcactatcggcaggagcagaagctgttcctgaagcggcattgtcggcaggcgcagcctcatcaggattcgggaaagaaccgccgcttttgttcgccatgtaagtaatcgcccgtttaagttcctgatcggtcaggtctgccgcaccgccttttgcaggcatggcgttaaagccgttcagcgcgtgttggaacaaggtatcgaagccttgcgcgatacgcggtgcccaatcgccgttgtgttccagtttcggagcgttcggcacattgctgtccgccgcgtggcattggatacagattttgccgaaaatctgttcgccttggcgttcgccgacggggatgccgtcgcccatcgtcaattgtccgacaggctggatacgggtctgcgttgctgcttccgtagtggcatcgacatcgccgaacgagccgctgcccgccagcttaatcaggaaataaaggactgcaataacaataacgataccgctcacaagggtaaacagtgcagagccttgggctttgttgtcgcggagttgtttcatttggtaggcctcgccgtcaggttaggttgtgctgtaaattatagtttggtgtgttaaacgcagttaacaatattttgctggattatactgaattcacagggtctttccaatcgctatcattgaaaatatgaaaaaatttgccaacggtatctgtataaaacaaataatcctttgaaaataattgtttatcctcaagaaaactctccttatgccgccatacgccgcctgccggcgcaagataacctttgccaatttgcagaatttacgttaaccttgcgttttccgcacccatagctcagttggaagagtgtcagtttccgaagctggaggtcacaggttcgatccctgttgggtgcgccaattataaagagaccgtctgaaagataaatatttttcagacggtcttttgacttacttcaaactcttatttcaagacttccgcaaatgcgcgggcaacatagtcggtattcgacgtattcagtccggcgacgcacatcctgccggaatccagcaggtaaacggcaaattcgtcgcgcagcctgcggacttgttccacgctcaatcctgtgtagccgaacatgccgcgctgtttgatgaaataagtgaaatcgcgattggggatttgcgcagttaagacatcataaagtttctgccgcatcgcacggatgcggtcgcgcatcatataaacctcgttttgccacaaggcgtaaagttcggggctgttcatcacgtcggcggcgatatacgcgccgtgcgcgggcgggctggagtagatgcggcggacggtgaatttgagctgtccgaacaccaaatccgcttcttccttattcgggcaaaccacgcttaagccgccgacgcgctcgccgtagagcgacaggttttttgagaaggaattgctgacgaacaagggcaattccatttccaccgctttgcggacggcgtaggcatcgctgtccaaatcgccgccgaatccttggtaggcaatgtccataaacggaatcagtttgcgcgttttgatgatgtgcaacacttcgtcccattgccgttccgacatatccacgccggtcgggttgtggcagcagggatggaggatcaggacgctgttttcgggcagggtgttgaaaaacgcggtcatttcgtcgaatttcacgccgacagtggcagggtcgtaatatgggtaagtgccgacctcgaaacctgcgccttcaaaaatgccgcgatggttgtcccaagtcgggtcgctgacgtaggcgcgcgcttcgggaaaccagcggtgcaggaagtccgccccgactttgagcgcgcccgagccgcccaaggtttgtacggtaacgatgcgcccttgcgcaagcgcgggattgtctttgccgaacaataaatgctgcaccgcgctgcggtaagtgtccaagccttccatcggcaggtagggcgacggcgcaggcgcggcggcacgggcggtttcggctcggctcacggattccaacacgggcattttgccttcgtcgtcgaaataaatgcctatgctcaaattgactttttcggggcgcgggtcgtttttgaaggtttcgaccaaactcaaaatcgggtcgccaggatagtattcgatgtgtcggtacatagtccttacctcttgctttttcaaaggattttctttttcaacaatacaccactttcgatatggtgcgtaaacgggaattggtcgaacagggcggcacgttcgaccgcatgggtttccgccaaggtgtccaaattggcgcgcaacgtttcgggattgcaggaaatgtagatgatgttgtcaaactgcgacaccagcttcaaagtttcctcatcgataccggcacgcggcggatcgacgaaaatagtggaaaatgcgtaatccgtcaaagcaataccgccatccttaaggcgtttaaactcacgttttccggtataggcttcggtaaattcttcagcagacagacgggcgattttgatgttgccgatgcggttggcttcgatattccattgcgccgcgctgacggaggttttggagatttcggttgccaaaacctgtcggaaatatcgggacagcggcagggtgaaattgccgtttccgcaatacagttcgagcaggtcgctgcccaagccttccgccgtgcggcacgcccattcaagcattttctgacacacggcggcattcggttgggtaaaactgccttcaatttgccgataacggaaatcccggttgccgaccttcaaagtttccgttacatagtcctgttttaagactattttctgtcccctgctccgcccaataacggaaatatccaactgttgctgtaacgcttgcgccgcctgcatccactcagcatcaagccttttgtggtaaatcatggtaaccagcatttccccgctgagcgtggacagaaattcgacggcataccagcgttttttgagttcgggggattgcgcggcggcggcgatcagctcgggcatgaggcggttgacagcctcggaagctgcttcaaaacggtcgcagcgtatcatgcttgcgccgctggctttctgccctttttcaaacatggcataaaacatttccccgccttcgtgccaaatacggaactcggcacgcatacggtaatgtttgtccggagattcgtacacttcccactcaggaacatccaaacctgcaaaaagggttttaaggtagtcttttttaccttgaagctgctgcgtgtagtcattcatatcgctatcctgaaaaatcagaccggattataagccgatttgcctcgccgcacgcaaactctttgactgccgccccttcaatgacggacgggcttttgtgctaaaatccgccatctttccacactataccgataaagggaaaaatcatggcaggcaacactttcggacaactcttcaccgttaccaccttcggcgaaagccacggcgcgggtttgggctgtatcatcgacggctgcccgcccggcttggaattaagcgaagcggatatccaatttgacctcgaccgacgcaaacccggcaccagccgccacgttacccaacgccgcgaagccgaccaagtcgaaatcctctccggcgtattcgaaggcaaaaccaccggcacgcccatcgccctcttaatccgcaataccgaccagcgcagcaaagactacggcaacatcgccaccagcttccgccccggccacgccgactatacctattggcacaaatacggcacgcgcgactaccgcggcggcggcaggagctccgcccgtgaaaccgccgcccgcgttgctgccggagccgttgccaaaaaatggttgaaagaaaaattcggcacggaaatcaccgcctacgttacccaagtcggcgaaaaagaaatccggtttgaaggctgcgaacacatttcccaaaatcctttttttgccgccaaccatagccaaattgccgagctggaaaactatatggacagcgtgcgcaaatccttggattccgtcggcgcgaagctgcatatcgaagcagccaatgtccctgtcggcttgggcgaacctgtttttgaccgcctcgatgccgaaatcgcctacgcgatgatgggcatcaacgccgtcaaaggcgtggaaatcggcgcaggttttgacagcgtaacgcaacgcggcagcgaacacggcgacgaactgaccccgcaaggcttcctgtccaaccactcaggcggcatcctcggcggcatcagcaccgggcaagacatccgcgtcaatatcgccatcaaacccaccagctccatcgccaccccgcgccgcagtatcgacatcaacggcaaccccatcgaactcgccacgcacggcaggcacgacccctgcgtcggactgcgctccgcgccgatcgccgaagccatgctcgcgttagtcctcatcgaccacgccctgcgccatcgcgcgcaaaatgccgacgttcaggttaatacgcccgacattaccctttcaaacaaataaaaatttagccaaaacacagactttataatagaatatcgagcattgccgtgcagccttgacgcacgggtttgtttagaggaatacaaccgaaatgacacaagaaaccgctttgggcgcggcactaaaatccgccgtccaaactatgagcaaaaagaaacagaccgaaatgatcgccgaccacatctacggcaaatacgatgtattcaaacgcttcaaaccgttggcgctcggcatcgatcaggatttgattgccgctttgccgcaatacgatgccgcactgattgcacgcgtcctcgccaaccactgccgccgtccgcgctatctgaaagccttggcgcgcggaggcaaacgtttcgatttgaacaaccgtttcaaaggcgaagttacccccgaagaacaggcgatcgcgcaaaaccatccttttgtgcagcaggctttgcaacagcagtccgcccaagctgccgccgaaacgctgtctgttgaagccgaagcagccgaatcttccgcagcagaataaatccccaaacgaaatgccgtctgaaaaccgatttggtttcagacggcattttttcgtatgcggcaatcacggttcaaatatccaattccgccgtatcgccttcgcgttccatccaagcgcggcgggcggcggcttcgcctttgcccatcagtttgacgaagatgtcgcgcgtctcgtcatctgcaccttctgggatttgtacctgcaacaggcggcgggtgtcggggtgcatggtagtatctttgagctggtcggggttcatctcgcccaagcctttgaaacggctgatggaataggcggtttctttaacgccttctttttgcagccgctccaaaatgctgtcgagttcgttttggtcgagggcgtagaatttgcgggcaggtttgctcttaccttgtgcgttgacatcgacgcggaacagtggcggctgggcgacgtagatgtgtccgtcggcaaccagtttcgggaagtggcggtagaacagggtcagcagcaaaacttgaatatgcgagccgtccacgtcggcatcggacaggatggcgattttgccgtagcgcaggccgcttaaatcgggatggtcgttaataccgtgcggatcgacgccgatggcgacggaaatgtcgtggatttcggcgttgccgaagagttggtcggggtggacttcaaagctgttgagcactttgccgcgcaggggcaggatggcttgggtggctttgtcgcgggcgagtttggctgagccgccggcggaatcgccttcgacgaggaagagttcgttttcgcggatgtcttcgctttcgcagtcggtcagcttaccgggcaggacggcgacgccgctgccttttttcttttcaatctttttaaccgaacgcatccgcgcctgtgcttggcggatggcgagttcggcgatttttttgccgaagtccacgttttggttcagccacaattccaaagggtcgcccgatacggtggcgacgagtttcagcgcgtcgcggttggtcagcttgtctttggtttgaccttggaactgcgggtcgaggacgcgggcagagagaacgaaggcggtttttccgaacacgtcgtcgctttgcactttaacgccgcgcggcaagaggttgtgcagattgatgaagttgttgactgcgttgaacacggcttgtttcaagcctgcttcgtgcgtgccgcccagcggggtggggatgaggttgacgtagctttcgttggcgcacgagccttcttccagccaagtcagggcaaacgccgctccttcgccgatgctgaaatcgccgttgtgttcgtctgaaatgtagttttcgcaagagaacagcggtacggcttcctgcgcgtcggcaatcaggtcggtcagatagcttttcaggccgtcggggtaatgccaggtttgggtgtgcgcttcgtcttcgcctttgaccggacgggtcagggaaacgcgcacacccggcagcagcacggctttggcacgcagcaggcgttcgagttcgggaatgctgtaattcgggctttcaaaatatttgccgtccggccagacgcgcacttctgtaccgctgtctttgacggcgcatttgcccacttgtgccaacggttcgaccacgtcgccgccggcaaacacgatgcggtggattttgccttcgcgtttgaccgttacttcaaggcgggtggaaagggcgttggtgacggatacgcccacgccgtgcaggccgcctgaaaaggcatacgcgctgcctccgtcttttttgttgaacttgccgcctgcgtgcagacgggtgaatacgagttcgactacggatacgccttcttcgggatgcaggccgacgggaatgccgcgcccattgtcgtgcacggaaagcgaaccgtcttcatgaatttgcacgtcgattgcagtcgcgaaaccgcccaacgcttcatccgacgcgttgtcgatgacttcttggcagatatgggtcgggctgtcggtgcgggtgtacataccgggacgttctttgaccggctccaagcctttgaggacggtgatgctggattcgctgtattggttgtttttagccatgggaataatctgaaagtaagaaaaacaacgctttcagacggcctgaaagcgttgcgttccgttgttttagcggttgtcggaagattggcgggcggcaaagtcttcataactttccataccgcgcaggaagcgggaagagagttctttcaacgcccccaaataaacgtcgcgtttgaaatcaatcacttcgtcaacgggtgcccaatattgatgccaacgccagccgtcaaattcggggtggcgggtggcgcgcaggttgacatcgcaatctcggccggtcaggcgcaggagataccaaatctgcttctgtccgcgataagagccgcgccattcgcggcgtacccagttgttcggcacgtcataacgcagccagtcgcgcgtgcggccgataattttgacgtgttgcggcaaaagcccgacttcttcgtacaactcgcggtacatggcggtttcggggctttcgcccggcttgatgccgccttgcggaaactgccaagaatgttcgcgcacgcgcttaccccaaaagacttcgttgcggttgttgattaagatgataccgacattggggcgatagccttccctgtccaacacggtgtcgccctccgttaaattcaatcttgggattttcccacaaatcaggcggttttgacaaatcagacggcatggcggtacgcgtgccgaaacacggggggatttgggaaaatatcttaaatttggtttacaataatgtatttcaaattattcgggaatcagaccatgttagatatccaattgctccgcagcaacaccgccgccgttgccgaacggcttgcacggcgcggttatgactttgataccgcacgttttgacacactggaagaacgacgcaagtccgttcaggtgaaaaccgaagaattacaggcctcgcgcaacagcatttccaaacaaatcggcgcactgaaaggtcagggcaaacacgaagaagcgcaggcggccatgaatcaggttgcccaaatcaaaaccgatttggaacaggctgccgccgatttggatgccgttcaaaaagaattggacgcatggttgttgagcatacctaacctgccgcacgaaagcgtacctgccggtaaagacgaaaccgaaaacgtcgaagtccgcaaagtcggcaccccgcgcgaatttgactttgaaatcaaagaccatgtcgatttgggcgaacctttgggtttggattttgaaggcggtgcaaaactctccggcgcacgatttaccgtgatgcgcggacaaatcgcccgtctgcaccgcgccttggcacagttcatgctggatacgcacacgctgcaacacggctacaccgagcattacacgccttatatcgttgacgatacgacgctgcaaggtacgggccaactaccaaaatttgcggaagatctgttccacgttacccgtggcggcgacgaaaccaaaaccacccaatacctgattccgacagccgaagttaccctgaccaataccgttgccgacagcattatcccgtccgaacaactgccgctgaagctgaccgcgcattcgccctgtttccgcagcgaggcgggttcgtacggcaaagacacgcgcggtctgattcgccagcaccagttcgacaaagtggaaatggttcaaatcgttcatcccgaaaaatcatacgaaacgctggaagaaatggtcggccatgccgaaaacatcctgaaggctttggaactgccctaccgcgtgattaccctgtgtaccggcgacatgggcttcggcgcggcaaaaacgtatgacttggaagtttgggtgccggcgcaaaatacctaccgcgaaatctcaagctgctccaactgcgaagatttccaagcccgccgcctgaaggcgcgtttcaaagacgaaaacggcaaaaaccgcttggtacatactttgaacggctccggcttggctgtcggcagaacgctggtcgccgtattggaaaaccatcaaaacgccgacggcagcatcaacatccctgccgcactgcaaccgtatatgggcggtgttgccaagttggaagtcaaataagtttgcaggctgcctgaacgtcaaatgccgtctgaaacctgtttcagacggcatttcctttaaacttttaaaacacgtcagccgtcggcacgaaccgcattgccgcaatcgccggtctgtccgacctcgcggatattggacagcgtaacttccgaaatattacccaacgcctcttccgtcaaaaatgcctgatggccggtaaacagcacattatgacaagacgacaggcggcggaacacgtcgtcggtaatcacatcgttggatttgtcttcaaaaaacagctcgcgctcgttctcgtacacatccatgcccaatgcgccgattttccggcgtttcaacgcctcaatcgcggcggcactgtcaatcagcccgccccggctggtgttgataatcatcacgccgtctttcattttgtcgaacgccgcttcgttcagcatatagtggttttccggcgtggcggggcaatgcagcgtgatgatgtccgaccgggcatacagctcgtctaaatccacatatttgccgccgattttttccgcttcggggttgcaaaacggatcgtaagccagcaggttcatgccgaaaccctttaaaatccgcatggttgcaataccgattttccccgtgccgataacgcccgccgttttgccgtacatattgaaaccggtcagaccttccagcgaaaaattcgcatcgcgggtacgctgataggctttgtggatacggcggttcaacgtcagcatcagaccgaccgtatgttccgcaaccgattcgggcgaataggcaggcacgcgcacgactttcaagcccaactcttcagccgcctttaaatccacattattgaagccggcacaacgcaacgccacagttttcacgccaatttgcgccaatttttccaacacgggccggctgccgtcgtcgtttacaaaaatacagaccgcttccgcgccttccgccattttcgccgttttcgcatccagcataaaatcaaaaaactccagctcgaagccgaaatgccggttggcgcgggtaaaatgttcgcggtcatagcttttcgtaccgtaaatcgcaatcttcatcaatatgtccagttgtcgtctatggttgagaaacggcataatacactgaattcaaacaaatcagtagaatatggtggattaaaattgattgcatgcacggcatttccatttcaaaacacaaaactcaatcgcccattgccgccagaagctcggcctgatgctcggcaatcagggcattggtgatttcttccaagtcgccgtccatcacaaaatccagcttgtgcagggtaaggttgatgcggtggtcggttacgcggccttggggatagttgtaggtgcggatgcgttcgctgcggtcgccgctgccgatgagggatttgcgctcggcggcttctttggcttgggcttcgcgtttttgcgcgtcgttcaggcgggcggcgaggactttcattgcctgcgctttgttggcatgttggctgcggccgtcttggcattcgaccaccatgccggtgggcaggtgggtgatgcggacggcggagtcggttttgttgatgtgctgaccgcccgcgccggatgcgcggaaggtgtcgatgcgcaggtcggctgggttcagttcgatgtcttccagttcgtccgcttcgggcatgacggcaacggtgcaggcggaggtgtggatgcggccttggctttcggtggcggggacgcgctgcacgcggtgtccgcccgattcaaatttcaaacggctgtacgccccgagtccgacaatacgggcgatgacttctttatagccgcccaattcgctttcgttggcggacacgatttcaacctgccaacggttgcgctcggcgtagcggctgtacatacgcagcaaatcgccggcaaacagcgcggcttcgtcgccgcccgttccggcgcgtatttcgatgaagatgtttttgtcgtcgtcggcatctttgggcagcagcagtttttgcagttcggtatcgagttcgccgattttggctttggccgcttcgatttcttcggcggcaaagtctttcatttcggggtcggacaacatttcttcggcatccgccaagtcgctttgggcaagccgatagttttggaacacttcgacgacgggggtcagttcggcgtgttcgcgcgtgagcttgcggtagttgtccatgtcggacgtggcttcgggctgtccgagaaggtgggtaacttcttccagtcggtcgctgagttgttgtagtttttctaagatagacggcttcataattcttccataacaaacgccgcctgaatgttcagacggcatcaacactggattattataataggttttccggatattcaaaaagataatcttagatggataacctaccgtcccaacagggcatcggcattgcgctccgttacctttgcaatctcttctacacaggttccgcggatttccgcagcaatctttgcaatacccggaatattggcaggcgtattaatctcttttttcagcataaacgggctatccgtttccaatacgaaatccccgtcgttcaaggctttaagcgtatcgcgcactttacgcgcgttcggattgagcagcagcgaaccgatgccgattttgaaacccagtttcgtcaacacacgcgcttcttccgcgctgccggagaaggcgtgaacgatgccgccttgggcaaagcctgtctgtttgacggcggcggcgatgtcggcggtggctttgagattatggataatcacgcggcggcgcagggtttgcgcaatttcaagctggcggacgaaaacttgaatttgccgttcgcgctgctgcgacgtttgggttttatcgtaaaaatccaagccgatttcgccgacccatgcctgcggataatgtgccaacatcgtttccaggcggacgaaatcccgctcggcaatgccgtctgaaaaccaaggatgaatgcccagtgcaatacggatttgaccgtgttcggacggcatttccgccaaatccgccacgtcctgccaatcctgcgggcgcgtcgcgggaacgataaaccgcttcaccccaactttccgcgctgcggtcaggatgtgcggcaggttttcgcgcagggcgggatcagcgagatggcagtgggtgtcggtgaagttcatttcgatttcacactaactttagtcttaccaattctttgtaaacatcttccttaccccagccttgcgatacggcgagggtcatcagcgcggtggcggtttcgaggttgcatttgccgccgttgatgatgcccgagttgcggaacgcgttgccttgcgcgtaaacggcggcggttttgccttgtcggacttggctgatgttgagcagcagtttgccctgccgcgcgaagtctcggacggcgcggataaaaccttcgtctgcgggcgtgttgccgtgtccgtagctttgcaggataagagcttgggcgggaagctgtccgagtccgtccgcaagttcttggacggcaaagccggggataagcgtgcggacagcgatttttgcctgcgggtcgggataacggattttgaggccgtctgaaacggctgctgcgtcttgggacgggaggcgaagattgtgccaaccccgggtttcgtcccattcggcaagcgtgccgaaatgcggattgtcgaagcctgcagcagtttcggtgctgactttgctgctgccgacggcgggatacagtttgccgtcaaacgcgatgacggtttgtttgagcttgaggctgaaggcggcaacggcggtggagaggttgcgcggggcatcgctgttttcggcggcgtaaggccattgggaaccagtcaggacaatcggtttgcccaaaccttgcagagcgagcgcgaggagattggcggtgtacgccatgctgtccgtgccgtgcagtatcaggatgccgtcgcatgaagggagtttgtcggcaatgatgtccagccaatcgcgccagtgttgcagcgtaacggaggaggaatcaatcaagggattgcagacgtgccactcgaaatcgaggccgtctgaaaagggggaaagggcttggctaaccagtgcggtatcggggcgcaggccttcgctgctttgggtcatgcctatggtgccgcctgtgtagaggacgaagattttttgtttcatggacatcatcgggtcgtctgaaaataataatacggcttatttaactatatttcggacagactggcaatttggcggcgcggacggttttcagacggccttcaaatgaaaaagcacccgagggctgtcgatatttgattttccaagtagatttttattcacgaaataggagagccgcaacaagcttaaatcccttgtgaggttcccaacacggaagataccgctttgtggattaaaaaatacggaaactattgaatatcgacaacctatttaggtgcttgattttattgtttgctttgcgcggcttttttggctgccttggcggctttgcgttgcgcccgcttttctttcaatttgctgcggtaaaactggatacgttggcgttttttccaccaaatccaagcgacaacggtcgcacctatacccaagataacaaaaatacccgattgcaggctgtgcattttcgccatcagccaatcgatgttgtgcgcaccgtattcgcccagataaatccaaatagggacggaaatcagtgcggccagtccatccataatgataaaacgcaagtatgaaaccttgcggctgataccggctgtaacaaatacggccgttctcaaaccgggcaggaaacgggcgacaaataagacccagttaccgtatttgtcgaatttttcctgaacctgctcataacgtttcggcgtcatgatgcgcgcaataggtttgaaccttaggattttctgcccccaaattcgtccggcggcgaacatgatgccgtccccgaccaatacgccgagcataccgactgcaaacataatatgcggattggtataacccatacccgaaatcacgccgcctgttaccaaggtcaaatcctcgggaatcggcacgccgaaaccgcagatgaccaatacaaaaaaaacagccgcataaccgtattcgacaaaaaaggcttctaaaaaagcaaacatggcggatattccattgtcggagataaaaagtcagaacaaaccgaaacattttctacatgaagcaggcattctatcaaagattatgccgtctgaaagcggaaaaaaggcagattcgcgcatcctccgcatgttcagacggcatttaaacagaaaaccggccggttctaaaaacggttttgcctgattttgcctaaatgccgccgatggcggcggcaatgcgttccgccccttcgcgcgcccaatccgcctgccgcgcctccaccatcacgcgcacgacgggttcggttcccgaagcgcgcaacacgacacgccctttgccttcgagttctttttccacttccgccaacacgtctttcgaagcttcctgccattgctgacctttttggatgcgcacgttaatcatcgtttgcggatacggctgccaatcggcgcaaacggtggcgaggtcttggttcagcgtttgcagtgccgccaaaacttgcagcgcggaaataatgccgtcgccggtgttgtgtttgtccatacacaaaatatggccgctggcttcgccgccgatgagccagccgcgttggttcagctgttccaacacatagcggtcgccgactttggcgcggcagaaatccacgccctgctctttcagggcgatttccatcgccatattggtcatgaccgtgccgaccacgccgccgatgttgataccttctcgggcgcgggctttggcaatgacgtaaatcaggctgtcgccgtcgtaaacctgcccgtttttatcgaccatcatcaggcggtcgccgtcgccgtctaaggcgatgccgtagtcggcttcatgctgtaaaacggcggcctggagtgtcttggtataagtcgcaccgcatttttcgttgatgttgtagccgttgggttcgttgccgatgctgacgacctgtgcgcccagttcgtgaaacaccttgggggcgacaccgtaccccgcgccgttggcggtatcgacaaccaacttcaaaccccgaaggtcggaatggctgggaaaggtggatttgcaaaattcgatatagcggtcgtccgcaccgctgatgcggcgtgcgcgaccgagacgggcggacggttgggttttcatttcgccgtcgattttggcttcgatttccaactcgacttcatcggaaagtttcacgccgccttcggcgaagaatttgatgccgttgtcggaataggcgttgtgcgacgcggaaatcatcacgccggcggacaggcgcaacgcgcgggtcagataagccacgccgggcgtgggcagcggtccggtctgtaccacattcacacccgccgccgtaaaaccggccaccaaagcggcttccagcatatagccggaaatgcgcgtgtctttgccgatgaggacggtcggtttctggtcggtgtcgtgctgcaccaaaacctgccccgccgcatagccgagtttcaatacgaaatcgggcgtaatcggaaattgccccacttcgccgcgcacgccgtccgtgccgaaatatttttttgccatgtgttgctccgagaatgtgaaccgttgtccgagattatacagtcagtttgtgccttgctgtctgcaccgttgatgccgtctgaaaccgccccgtccttttcagacggcatgaagtatgtgaaccgctgtttacagattgatgcccaacgcttcccacaccttcaacgcatccgctgtcgccttcacatcatgcacccgcacgatttgcgcgccgcgcgctacggaagccaacgctgccgccacgctgccgtgtacgcgttccgccgcatttgcctcgccggtcagctcgcctatcgtgcttttgcgcgatacgccgatgagcagcggaaaacctgtttccgccatcaattcgggcaaatgccgcatcagcgcgatattgtgttgcaagggtttgccgaagccggagccgaagccggggtcgagtatgatgcgttgcggtgcgatgcctgccgcgatacattccgctgagcgcgctttcaaataccgcgctacttcaccgacaacatcttgatatttcggattaatctgcatggttttgggcaaaccctgcatgtgcatcaggcaaatgcccgtgtccgcctgacgcgccagcaattcgaccgcgccctcgtcattcaacgccgccacatcattaataatatcgatgccgccgagtgccaacgctttttccataatcaccgtgcggcgcgtgtccaaactgatgggaacgccccaccccgccacttccgccaaaacaggctcaacccgcgcccattcttcttcaggcgaaacataatccgcacccgaccgcgtcgattcgccgccgatgtcgagaatgtctgcgccttcttttagaagctgttcggcatgtgccaaggctgtttgggcgttttgcgaatacacgccgccgtcggaaaaagaatcgggtgtgagattcacgatgcccatgattttcggtttgtccaaaccgatttcaaaccgtcctgcctgccaaacgtgtcgtgccatctgaactcctcccaaaataaaaaacagattatatgccgtctgaaaccgtcttgtgcgcttcagacggcaccgctattcgggcggcagacggcatgttgtccgaatgtctgctccgcctttgaatctgccggtatgcctgctatccgcccgacttttcaaaacaggttccgacgattccgcacgcgcctgccgcctttgccaagccgtacaggatttcctgcggcatatcgcggttccataatcccgtaatattcgcaatcacgggcagatggctgatttggcggactttcacgatggattcgacatccaaacggtagggatggcctttggtatggttcaatacgcccgactcgcccagaatcaggtggcggttgccgcgcgagacgacatattctgcggcattcaaccaatcttcggcagaatggtgcttgtctttacacagcaccaagggaatgttcaggtttccggcttcattcaatacggcaagatcggacatcagcccgccgcccaaatacaggatgtccgcccccgcattcaaagccgcttcgacatggcggacgttgcggacgcgcaccaatacgggtttccctgcatcatgcgccgatgcggtctgttccgccaaccgtctgcaccgtccccgcccttcatccgcacttgaagtgtcgtataagtttgccgaagtgaaaaacggatccagaaacactgcatccgcattgcgccatactgacggttctgcggcgatacggacggtttccccgccgccgaaagccacgcctttggcggcaacgcggctgtcttccgcccgattttcccgactgacggttttccatgtatccaaaatgcggacggctttctcgacctccggcagcgtctgcacctccctgacgctcaaaaccctatcgtcgccgattgcgccgatgacagtacgctcgtcgccgtgagaaatgtgttctcgcagacctctgctgcggataaaggcgacaacgccggcaatgtccgcttcggcggcacgcctgctcatgacaataatcatatttcctcctgacacaagaaacggcctacccaaaataggatttttgcaagccgtgttatactgtggcgtgttttacagattgttcgggctatggatttattatcggttttccacaaataccgtctgaaatatgcggtggccgtgctgacgatactgcttttggcggcagtcgggctgcacgcttccgtatatcgcaccttcacgcctgaaaacatccgcagccgcctacaacaaagcattgcacacacacaccggaaaatctcgtttgatgcggacattcagcgcaggctcctgccccggccgaccgtcatcctgaaaaacctgaccattaccgaacccggcggcgaccagactgccgtttccgtccaagaaaccaaaatcggattgagctggaaaaacctgtggtcggatcagatacagattgaaaaatgggtggtttcgagtgcggaacttgccctgacgcgcgacgggaaaggtgtttggaacatccaagacctgatcgacagccaaaaacgccaagcctcagtcaaccgcattatcgtcgaaaacagcaccgtccgcctcaatttcctgcaggaacagcttatcctgaaggaaatcaacctcaacctgcaatcccccgattcgtcggggcagccgtttgaaagttcgggcatactggtttggggaaagctgtccgtcccgtggaaaagcagggggctgttcctttcaaacggcatcggcccgcccgaaatctcaccgttccattttgaagcttccacttcgctggacggacacggcattaccatttccaccaccggcagcccttctgtccgcttcaacgccggcggagcggatgccgccggcctcggcctgcgtgcagacacttccttccgcaacctccacctgaccgcccaaatccccgcgctggcactcaggaacaacagcattaaaattgaaaccgtcaacggcgcatttaccgccggcggcgaatatgcccgatgggacggttcgttcaaactcgacaaagccaacctgcactccggcatcgccaacatcggcaacgccgaaatctccggcagcttcaaaacaccgcgccaccagaccaacttctccctcaattcgccgctcgtatggacggaaaacaaagggctggacgcgccgcgcctgtatgtatcgacccttcaggataccgtcaaccgcctgccgcaaccccgtttcatcagccggctcgacggttcgctgtccgtaccgaatctgcaaaattggaatgccgaattaaacggcacattcgaccgccaaaccgttgccgcgaaattcagatacacacatgaagacgcaccgcatctggaagccgccgtcgcactgcaaaaattgaacctgaccccctatcttgacgacgtgcggcaacaaaacggcaaaatatttcccgacaccctcgccaagctgtccggcgacatcgaggcgcacctgaaaatcggaaaagtccaacttcccggcctgcaactggacgatatggaaacctacctccacgccgacaaaggccatatcgcgctcagccgtttcaagtcagggctttacggcggccataccgaaggcggcatcagcatcgccaacacccgtcccgccacttaccgcctgcaacagaatgcaagcaacatccaaatccaaccgctgctgcaagacctgttcggcttccacagcttcagcggcaacggcgacgcggtcatcgacctgaccgcgggcggcgaaacccgaaaagagcttatccgctcgcttcagggcagcctgtcgctaaatatttccaacggtgcatggcacggtatcgacatggacaatatcctgaaaaacggcatttcgggcaaaactgccgacaatgccgcacccagcacacccttccaccgattcacgctcaacagcgaaatttcagacggcatcagccgccacatcgataccgaactcttctccgacagcctctatgttaccagcaacggctataccaatctggatacgcaggaattgtctgaagatgtccttatccgcaacgccgtccatccgaaaaacaaaccgattcccctgaaaatcaccggcacggtggacaaaccgtccattaccgtcgattacggcaggctgaccggcggcatcaattcgcgcaaagagaaacagaaaatcctcgaagacaccctgctggaacaatggcagtggctcaaacctaaagaaccgtaaacatcctgcgtacaaaaatgccgtctgaaacacccccgcgcttcagacggcagaccgtaaaacctacaaccccaattcctcccaaatcccatcaatcttagccgtaaccgcagggtcttttttgatgacgcgtccccattcgcggtcggtttctcccggccatttgttggtcgcatccaaacccattttgccgccgagtccgctgacggggctggcgaagtcgagataatcgatgggcgtgttttctaccaaaacagtgtcgcgcacggggtccatgcgcgtggtgaccgcccagatgacttctttccagtcgcgcacgttcacatcgtcatccaccacgatgatgaatttggtatacataaactggcgcaggaacgaccagcagcccatcatcacgcgcttggcgtgtccggcgtactgttttttcatgctcaccaccgccatgcggtaggagcagccttcgggcggcaggtagaaatcggtgatttcggggaactgcttttgcaaaagcggtacgaacacttcgttcaacgccacgcccaaaacggcgggttcatcgggcggtttgcccgtgtaggtcgaatggtaaatcgggttttcgcgcatggtgatgcgttcgaccgtaaacacagggaaataatcctgctcgttgtaatagccggtgtggtcgccgtacgggccttccaacgcggtttcgttcggatggatgacgccttccaacacgatttctgcgcgggcaggcacttgcaaatcgttgccgatacatttcaccagctccgtccgcgaaccgcgcagcagtccggcaaactggtattcgctcaaggtatcgggaacaggcgttaccgcgcccaaaatggtggcggggtcgcagccgagtacgacggcgacgggatacggcgtatcgggattgagtttgcggaactcctgataatccaacgcgccgccgcgatgcgacagccaacgcataatcagcttgtttttgccgatgagttgttggcggtaaatgccgagattttggcgttttttgtgcggcccgcgcgtgacggtcaagccccacgttaccagcggcgcaacgtcttccggccagcaatgctgaatcggaagttgatacaaatcaacgtcttcgccttcccacacgatttcctgacacggcgcgtttttcaccacgttcggcgccatgctccaaatgtctttcagcagcggcagtttggaaaacgcatctttgatgcctttgggcggttcgggttctttcaaatacgccagcgtctgcccaatttcacgcagcttggacacgctgtccgcgcccatgcccatcgccacacgttcgggcgtgccgaacaggtttgccaacacgggataaccgtagcgcgtaccgtcgggcttaatcgggttttcaaacagcaacgccggcccttcggcacgcagcacgcggtcggcgatttcggtcatttccaaatacggggaaatggggtgtgcgacgcgcttgagtttgccctgctgctcgagcatggcgatgaagtcgcgcaggtctttgtatttcatattcatcctttttgtccttttatcctgaacaatccgattcggataccgcccctatccttgcctgtgcctcggcatattctatgccgtgataaaagtcgcgtaccagcggatgttcgccgccttgatggagttgcaacaaaggacgttgaccatcgggttgggtaacgacattgcagtgcagaccgaaggtgtcggtttcataagggggcagctggttgcagatcatgccgaaataaacagcgttttcaaggttgtcgtaaaagcggctttgatagtcgttaaaactcttttcgctgacggatacccacacgccatattccagcgtttcctcatgcccgataatcggaatcggcagcaccgcgcggataaagcggtcggtttggtcgggatagcggatgatgcagaaatcagaatcgcattctgcttgataagcaatgcgttcttcttcactgagttgattatagggatcgggtgcggtaaagccgattgcgggcatttcttcgtggttttcgccgcaggaagtgcaagtgtacataaggtttcagactttcaaaacgagtttgcggtaaagccattcgccggcaaacagcatccccatcaatacataggcaatcacgccggtataaaccgcccaccaatcatatcgccccaaccgtgccaacaaagcggcaagcgtcccgttgattataaaaaatacgcaccaaacctgcgttacccggcgggtatagcgcacggctttttcaggcaggtcgggctgttgcagccgcgcaagtttttcaatcaccgtctgcccggcaaacaggctgccgccgaacaccgccaacatcatcagattgacgaggacgggataccaatacatcgaatcatgccgcccgaacaccaatactgcggcaaaaaacagtgtaataaacaaagccgcataacgctgttggggcagtttggcagtcagggcgcgcagcagccacaacccgcacatcgccgccgccagccaaacaaaccagcccgcctccctgccgtatatagtggattaacaaaaaccagtacagcgttgcctcgccttgccgtactgtctgcggcttcgtcgccttgtcctgatttttgttaatccactataccacaaagcgggataggcaatgcttaatacggtcagaaaaatatgtccgaaaaaaccgggtttcattttgaatccgcacaaatgttttcagacggcatccgataaaaacatgccgtctgaaaaataattagaaatacccgattagcccgcctgaatcttcaataccgcctgtaccacgtcgttgacggtgcggacattgcggaaatcttcggcctgcagcttgcggccggtttcgcgcttgatgcggtcaatcaggtcgatggcatcgatgctgtcgatttccaaatcttcgtaaagattggtatcaggcgtaatccgttccggttcgatttcaaacaactcggtcagggtatcgcgcaacaaccggtagatttcttgttcggtcatatgtttcatccttatgcttggcggcttttgacaaaggcggcgagtgttttgacattggcaaaatgttcgcgcaagttctcctgctcgccgtccaatcggaaaccgaaatgtttttgcaccgccaagcccaattccagcgcatcgacggaatccagtcccagccctccgtcgccgaacagcgcgtcttcgctgccgatgtcggcggcggttatatcctccaaagccaaactgtcgataatcagttgtttgatttggttttccaagtcgttcatatggttttccttgtaaaatagtcctgcagatattcattcagccgccgcgccgcaatcggcaacggtttctcggcgagccagtcttgggggaggatgtcgtctccgacggtaatttcataccgtatccttttcggggggatgcggtaccacggctgcccctttttaaaattgggcggattcattttgatacatacgggcgtaatcacttcggcataccgcagtcccaaagaaaccgcgccccggtgcatttttacccgtccgtcccaccccgtcctcgttccttcggggaacaccagcaggctctgcccgctgtcaaaaaccgcctttaccgtttccagcattgcttccgactcttcgttcggaatatagcccgcacctttaatctggctgctcattgccggattgtgctgcaaatcttttttcacgatacagttcatttcgggcacatggccgacaagcagcaccacatccagcaaagacggatggtttgccaaaatcaactgtcccgggcggttgagtttttcaacacccttgaacgatacctccaacacgcccgaccatttcagataagcaacgaacaaacgccaagatgttccgataatccggcgcgccgccaattggcgggcgacagaccctgaagtgccgttcaaagtataaggcaacaaaaccaatttcatcataatgccgccgacaccgaaaatcacaaatcctaaccaagtcgcaaaaaaacggcggcaataatccaatttatccattccgctgccacagccattcacgattgcgatatacccggcggcattctcgactgccgttcagcagaaagcgcacccattccaaaccgctccaatatgcctcgggcagcataccggcttcagacggcatatcgtccgaagcagacaaagtcaggctgtaacgcgtccctttggtcagaaccatcgccaaagcataagcaaacggcgcgcgagtcgccgatacggcatatccttccggcagcggatcgtccgccgccaaaaccaaaaccgacccgcatccctcttccaacagtgatgccgcttccgccaatgccgtttccacaccgtcggcacacacggccaatgccgtctgctcgctcatatcctgacgcaatatcgaccattgccccgccgttgcattgtgcaccgacaaaccgaacgaagtcggcgacacggtatgcgatttcaacagttccaaccacaaatcgaaactgcgtgccatttccccgtcgtgcgaggcataaactaccggactgccgggatgggcggaggcaatgtcccaagccgcgtcgcataccaaacgcgccgccttactcaaacggcggcgctgcatagcgggcaggaacggcaattccggcctgacatcgggcaaaccgtcggcaaaatccggacattccgcccattttgcccactgggccatatcgcgcattttgctgcccgaaacccgccaggcggcgatgtcgaagtggaaccggcaaataatcgacggcatagtttctttcaaaaatttacactgtgccgcattctaaccaaagcctatccccctgacaatgccgaaattcaaacgcatttctgccccctttctccgacaacgccgcccctcggaaaaccgccagaattagcctgaatttacatttatcattataatgcccgtatttgccagcctgccgccgcaatatatggacacactgccagaatgcccgattaccaacaccgcctccctgctgccgcacagcgggcgtatggttctgatagaccgcattacccgatacggcgatgattttgtcgaagcaggggcacaggtaagccccaatcacatccttttacttgacgacaaactgccctacacggcatttatcgaactgatggcacaggctgtcggcgcgtatgccggtatccaagcccgaaaaaacgcacggtcggtccggctcggcttcctgctcggcacgcgcaaacttgaaatcttcgcccaatccgtcccaatcggcacgcatctgctggcaacggcgcatatgtctattcaggatgccgggggtatgggcgtgtttgactgcgaactgcgttggacagacgcgccggaaacttcgtccgaaacactcccttcagacggcattttggcgcgcgcctcactcaacgtgtacagccccgaacaccctgccggaacaaccgatgccgtctgaacaggcacacacatacggagaacaacgatgaccgaaactgtcctgattaccggctccaacaggggcataggcaaagccgtcgcattcggtttggcggaagacggctttgatatcgctgtccactgccgcagtcgccgcgacgaagccgaagccgtggcggaagaaatccgcgctttgggcagaaatgcgcgcgtgttgcagtttgacgtgtccgaccgcgaagcctgccgcgagattctgaccgccgacatcgaagcaaacggcgcgtattacggcgtggtgttgaacgccggactgacgcgcgacaataccttccccgcgttttcagatgacgattgggatgtggtgctgcggactaatttggacggtttttacaatgtattgcatccgctggttatgccgatgatacgccgccgcaaagccggacggattgtgtgtatggcatcagtgtccggcctgacgggcaaccgcgggcaggtcaattacagcgcgtcaaaagcaggcattatcggcgcggcaaaagccttggcggtcgaactggcgaaacgcaaaatcaccgtcaactgtgtcgcgccgggtctcatcgataccgatattatcgatgagaacgtacctgtcgaagaaatcttaaaggctgtccccgcagcgcttatggggctgccggaagaagtggcgcacgcggtgcgtttcctgatggatgaaaaagcggcgtacatcacgcgccaggtgattgcggtgaacggaggtttgtgttgaataccagaagggtcgcagtaacaggcataggcggcattaccgccttcggccgggattggcaaagcatacaggcagcattcaaagccgaaaaaaacgccgtcaaatatatggattggcacgaacgtttccccgaattggaagcgcaactgggtgcgccgattgaaaattacgcgccgccgaaacattggacgcgcaagcagctcagaagtatggggcgcgtgtcgtacctgtgcgtcgatgcggcggagcaggcgctggcggatgccggtttgctcggggacgaaagcattaccgacggacggatgggcgttgcctgcggctcttccagcggcagcaccaaagacatcggcgatgtgggcgaattgttgctgaccggcacgtcgcgcaacttcagcgccaacacctatgtgcgtatgatgccgcacaccaccgccgccaatatcggcatctttttcgggctgaaagggcgcatcatcccgacatcgagcgcgtgttcgtccggcagccaaggcataggttatgcctacgaagccatcaaatacggtctgaccgatatgatgctggcgggcggaggcgaagaatttttcccgtccgaagtgtatgttttcgactcgctttatgccgccagccgccgcaacggcgaaccggaaaaaaccccgcgcccatacgacgcgaaccgcgacgggctggtcatcggcgaaggcgcggggattttcgtgctggaagaattggaacacgccaaacggcgcggtgcgataatttacgccgaactcgtcggctacggagccaacagcgatgcctaccatatttccacgccccgccccgacgcgcaaggcgcaatccttgcctttcagacggcattgcaacacgcaaaccttgcacccgaagacatcggctggattaatctgcacggcaccgggacgcaccacaacgacaatatggaaagccgcgccgttgcagcggttttcggcaacaatacgccctgcacgtccaccaagccgcaaaccggacacacgctgggcgcggcggacgcaatcgaagccgcgttcgcgtggggcattgccgaccggcaaagcaatcccgaaggaaaacttccgccccggctttgggacgggcagaacgaccccaacctgcccgccatcaacctgaccggcagcggcagccgctgggaaaccgaaaaacgcattaccgccagctcgtcgtttgccttcggaggaagcaactgcgtcttaatcatcggatgaaataagtttgtcaatcccaccgctatgctatacaatacgcgcctactcttgacgggtctgtagctcaggggttagagcaggggactcataatcccttggtcgtgggttcgaaccccaccggacccaccaattcccaagcccggacgtatgtttgggcttttttgccgccctgtgaaaccaaaatgctttgagaaaccttgataatgaaaaaagtcagcgtattgattgttgccaaaaacgaagcaaaccacattcaggaatgtattgaaagttgccgtttcgataaagaagttatcgttatcgacgactacagcaccgacaatactgccgaaattgccgagggtttgggcgcaaaagtcttcagacggcatttgaatggggatttcggagcgcaaaaaacatttgccatcgaacaggcaggcggagaatgggttttcctgattgatgcagacgaacgctgcacgccggaactatctgatgaaatctcaaaaattgtccaaaccggcgattatgccgcctattttgtcgaacgccgcaaccttttccccaaccatcccgccacacacggcgcgatgcgtcccgacagcgtatgccgtctgatgccgaaaaaagacagttcggtgcaaggcaaagtacacgaaaccgtacaaaccccctaccccaaacgccgtctgaagcattttatgtaccattacacgtacgacaactgggaacaatatttcaacaagttcaacaaatatacttccatttcagccgaaaaataccgagagcagggaaagcccgtgcgtttcgttagggacattatcctccgcccgatttgggggtttttcaaaatttatatcctgaacaaagggtttcttgatggaaaaatgggttggattatgtccgtcaaccacagctattacacgatgattaaatatgtcaaactatattatctgtacaaatccggcggaaaattttaaatggaaaaagaattcaggatattaaatatcgtatcggccaagatttggggtggaggcgaacaatatgtctatgatgtttcaaaagcattggggcttcggggctgcacaatgtttaccgccgtcaataaaaataatgaattgatgcacaggcgattttccgaagtttcttccgttttcacaacgcgccttcacacgctcaacgggctgttttcgctctacgcacttacccgctttatccggaaaaaccgcatttcccacctgatgatacacaccggcaaaattgccgccttatccatacttttgaaaaaactgaccggggtgcgcctgatatttgtcaaacataatgtcgtcgccaacaaaaccgatttttaccaccgcctgatacagaaaaacacagaccgctttatttgcgtttcccgtctggtttacgatgtgcaaaccgccgacaatccctttaaagaaaaataccggattgttcataacggtatcgataccggccgtttccctccctctcaagaaaaacccgacagccgtttttttaccgtcgcctacgccggcaggatcagtccagaaaaaggattggaaaacctgattgaagcctgtgtgatactgcatcggaaatatcctcaaatcaggctcaaattggcaggggacggacatccggattatatgtgccgcctgaagcgggacgtatctgcttcaggagcagaaccatttgtttcttttgaagggtttaccgaaaaacttgcttcgttttaccgccaaagcgatgtcgtggttttgcccagcctcgtcccggaggcattcggtttgtcattatgcgaggcgatgtactgccgaacggcggtgatttccaatactttgggggcgcaaaaggaaattgtcgaacatcatcaatcggggattctgctggacaggctgacacctgaatctttggcggacgaaatcgaacgcctcgtcttgaaccctgaaacgaaaaacgcactggcaacggcagctcatcaatgcgtcgccgcccgttttaccatcaaccataccgccgacaaattattggatgcaatataaactgctttcagacggcatatgccgtctgaaagcctttgatgcaacaaaccactaaattatattcgttcattggaaagaaacaccccgaattcatccttcaaaataagaaaatcccaatatcccccgatattacgcagcctattggcaaagttttgcagcgtcttccccggcttgtgctgccgcgtcaagtgctttgttacaatgtatagtagactaacaaaaaccagtacagcgttgcctcgccttagctcaaagagaacgattctctaaggtgctcaagcaccaagtgaatcggttccgtactatctgtactgtctgcggcttcgtcgccttgtcctgatttttgttaatccactatactaccttcacatttcttaataaattttatgagtaaccatacttcttggtcgtccaaaatcggtttcgtccttgctgcggcaggttcggccatcggtttgggcgcgatttggaaatttccttatacggcaggcaccaacggcggcgcggtgtttttcctgctgtttttgatatttactatcttggtcgccctacccgttcagcttgccgaattttatatcgggcgcacgggcggtaaaaatgccgtcgattccttcagggttctgcgtccgggcacgcaatggctttgggtcgggcgtatgggcgttgccgcctgctttattttgctgtcgttttacagcgtggtcggcggatgggtattaaattatgtcgtccacagttttacgggggcggttcataccggcgcggactttgaagccttgttcggcgcgacgatttccaatccggcaggttcgctgtcctatcaggcactgtttatgctgattacggtttgggtggtcaaaggcggcatttcagacggcattgaaaaggcaaaccgttatctgatgccggggctgtttatcctctttattgcgctggcaatccgttcgctgacgctgccgggtgcaatggagggcgtgtctttcctgctcaaaccgaattggtcgtactttaaagccgatacgatgattacggctttaggccaggcgttttttgccctgagcatcggcgtttccgccatgattacctacgcttcatatttgggaaaagatcaggatatgttccgttccggccatacgattatgtggatgaacctcttggtttcgctgcttgccggcctggtgatttttccggcggtgttcgccttcggttttgaaccgagccaggggccgggattgatttttatcgtattgcccgcagtgtttatgaagatgccgttcggtacggttttgtttgcggtatttatgctgctggtcgttttcgccacgctgacttcggcattttcgatgttggaaacggtcattgcctcaaccatccgccaagacgagcgcaaacgcaaaaaacacacttggcttatcggcacggccattttcattatcggcatcccgtccgcgctgtctttcggcgtatggggcgagtttaaggttttcggcaaaaccatttttgatttgtgggactatgttatttccgccgtcattatgccgattggtgctttgagtgtttccatctttaccgcctggattcaggacaagcagtctgtgttaaaagatgccggcgcgggcagcaccgtaccacgggcagtgctgctgctgtggctgaataccttgcgctaccttgccccgattgccattattattgttttcatcaattctttggacatcctttaaaagccatccaaacagcaaaaatgccgtctgaaagcctttcagacggcatttttgcttcgggttcagcctatttcgttcaaagtatagtggattaacaaaaatcaggacaaggcgacgaagccgcagacagtacaaatagtacggaaccgattcacttggtgcttcagcaccttagagaatcgttctctttgagctaaggcgaggcaacgccgtactggtttttgttaatccactatagccttgcgcgatgccgttcaaggacaaacccatacccttttcggcaaaacggatttcacggtcgtcaaacgagactttgccgaagccgacccgtttcagggcttcgtccacgctgttttgaggaggcggcgtttccgcatcgggacgggcggcaaaataatcggcatacagtttccacaacgcctgcactgtcggatcgaacgcgccgtccgtcagcgcgtgaatatcgcggcacaggctcaacagttccaaaaaatccgccgacggcgaagtcagataaccgtccctgttcaggcggctgatcaggctgtcttcacggtaaaggctgaacaattttttccaaacgcgccacttccgccaaaaccttgttgaccaaatccgccgcacgcctgtcgtccacaccgaacagacggagctccgcaccggaacccagtgcgacacctttccagaaaaacacattttcattgcgtttttcatccccgttgcgtttttcatcatcggcggcaaaaggattcggcaggaaagaaaccgccgcgcccgccgccgcaacggcggcaaccgtcagaaaacgcctgcgcccgaaatgcctgcccataccgcctctaaaccgacactgccgccttgatatgcggatgagggtcgtaaccttccaactcgaaatcttcaaacttgaaggaaaacaaatctttgacttcaggattgattttcatcactggcaaggcgcgcggttcgcgttccaactgcaatgcggcctgctcgaaatggttgcggtacaaatgcgcgtcgccaaacgtatggacaaactcgcccgcctccaatccgcacacttgcgccatcatcatggtcaacaatgcgtagctggcaatattaaacggcacaccaaggaaaatatctgcactacgctggtaaagctggcaggacagtttgccgtcggcaacgtaaaactgaaacagcgcgtggcagggcggcaaggccatttcatcgaccaaagccggattccacgccgatacaatcaggcggcgcgagtcgggattcttcttgatttgttccagcacattggcgatttggtcgatatgcctgccgtcgggcgcgggccagttacgccactggtagccgtaaaccgggcctaagtcgccgttttcgtccgcccactcgtcccaaatggaaacattgttgtcctttaggtatttgatattggtatcgcctttgagaaaccaaagcagctcgtggataatcgaacgcagatgcagctttttggtcgtcagcagcggaaaacctttgcccaagtcaaaacgcatctgataaccgaatacggagcgcgtacccgtaccggtgcggtctgatttgtccgtaccgttgtcgaggacgtggcgcatcaagtccaaataggctttcatagcagtctttcatcaaattaaacggcgcatattgtaacatttccggataatgcccaaaacacggatacaggcaggcaggattgttggcaatttcagtccttttccacagtaaaacccggtgggaaaacaaaattaccttgattggaatcaaaaaatctagtttaattacttagaataaaatttcaataatatttttatttacgaaattaatttatgattattgattaattatcggcaacaaacatcaaacatcgaaaatatggaaaaaataatgtcaacaatttttgccaaatcgggcttggcatcagaaaaaaataggtttatattcccacctacaaatttgttttcccattagtacactatcaaccaaaaggagtatccgaatgactgacctgaacaccctgtttgccaacctcaaacaacgcaatcccaatcaggagccgttccatcaggcggttgaagaagtcttcatgagtctcgatccgtttttggcaaaaaatccgaaatacacccagcaaagcctgctggaacgcatcgtcgaacccgaacgcgtcgtgatgttccgcgtaacctggcaggacgataaagggcaagtccaagtcaaccggggctaccgcgtgcaaatgagttccgccatcggtccttacaaaggcggcctgcgcttccatccgaccgtcgatttgggcgtattgaaattcctcgcttttgaacaagtgttcaaaaacgccttgaccaccctgcctatgggcggcggcaaaggcggttccgacttcgaccccaaaggcaaatccgatgccgaagtaatgcgcttctgccaagcctttatgaccgaactctaccgccacatcggcgcggacaccgatgttccggccggcgacatcggcgtaggcgggcgcgaaatcggctacctgttcggacaatacaaaaaaatccgcaacgagttttcttccgtcctgaccggcaaaggtttggaatggggcggcagcctcatccgtcccgaagcgaccggctacggctgcgtctatttcgcccaagcgatgctgcaaacccgcaacgatagttttgaaggcaaacgcgtcctgatttccggctccggcaatgtggcgcaatacgccgccgaaaaagccatccaactgggtgcgaaagtactgaccgtttccgactccaacggcttcgtcctcttccccgacagcggtatgaccgaagcgcaactcgccgccttgatcgaattgaaagaagtccgccgcgaacgcgttgccacctacgccaaagagcaaggtctgcaatactttgaaaaacaaaaaccgtggggcgtcgccgccgaaatcgccctgccctgcgcgacccagaacgaattggacgaagaagccgccaaaaccctgttggcaaacggctgctacgtcgttgccgaaggtgcgaatatgccgtcgactttgggcgcggtcgagcaatttatcaaagccggcatcctctacgccccgggaaaagcctccaatgccggcggcgtggcaacttcaggtttggaaatgagccaaaacgccatccgcctgtcttggactcgtgaagaagtcgaccaacgcctgttcggcatcatgcaaagcatccacgaatcctgtctgaaatacggcaaagtcggcgacacagtaaactacgtcaatggtgcgaacattgccggtttcgtcaaagttgccgatgcgatgctggcgcaaggcttctaagcaaacgccgccgctccgcaaacaaaatgccgtccgaaccgcaaatgctgttcagacggcatttccttatccgcccgttcaaatcgggtgagactaccgatacatctgaatatgctatgccgtctgaacggcattcacaccgcccaatcctgcacgcgcttcaaatcattttgcgccaaagtatctgcgtggcggttacggctctgatattccctgtctttcaagatgctgctcgccacataattcaaatgtgcctttgccgcctccgaagcctcgcccggccggcggtttgatattgcctcatacaatacacggtgctgcgccatcagcttcggacgcggatcttcttcctgattcagataaataaggctgctgcgcgtctgccggtacagcattttcaacaaaccgcccgacaaatggctgaacaacaaattgtgcgccgcatcggcaatcgtctgatgaaagctgacatcagcttcgctctgatgttccaaattgccgctttcgcacgcctcctcaaacttttcaagccaaaacccaatccgcttcaaatcggcatccgtgcggcgttctgccgccaatgccgccatacagccctcgatgtggcaactgaaatcaaaaacatcctgttcccaattggaatgcttgcccaaaagctcctgccaactttgcaaaaaatcctgctgcggcttgaccgaaacataataaccgtctccctgcctcgcttccaaaacctgacgggcgaccaaaacattcaatgccgacctgaccgacgggcgcgaaacgccgaactcttccgccaaaacgcgttcgggcggaatcttgcccccttccgcgtaaaccccttccgcaatgcgctcctccaataccgacaatacctgatcgctgattttctgaggccttaccagtttcatcactcctcctttataaagattccctgcagaacccttccgaaatatagtggattaacaaaaatcaggacaaggtgacgaagccgcagacagtacaaatagtacagaaccgattcacttggtgcttcagcaccttagagaatcgttctctttgagctaaggcgaggcaacgccgtactggtttttgttcatccactatacatcaaacatcaaattggactgaccaatcagggcggattctaatgacacgccgttcccgccgtcaacggcatttacctcgcaccgcccccgaaacacaagaaaaaactacaccaaactacaatttttgttcatgcaaatatttgttttgacaggatttaaacaaaagctccgattcaaatctgccgaaccgcccaaaaatatattgacctaaatattaaagtttcgtaaagtaatgcaacgttgctttaattggtttgaccactattgccgacgattagaaaaatattttcggagatgttcaattatggaaacttgggttcaaaactacacggcaatcggcggcagcctgtatctgactgccgccgccgcactcttacccatcgtctttttctttgccgcgctgaccgtcctgaagctgaaaggctatcaggcggggctttatacgctgctgattgcgcttgccgttgccgtattcggcttcgggatgccgacgggtatggcggtttcttccctgccgccgcagccgcattgacccaacgcccctacgccacactgtatttgaccgcgcattacaaaatcggcaaatccacccgcatcggtttggactttgaaaacgtgttcaacaaacgctaccgccctatgcccgacattcacgtttacggcacgccgcgcagcctgaccgcaaccgtcaaacatatagtggattaacaaaaatcaggacaaggcgacgaagccgcagacagtacaaatagtacggaaccgattcacttggtgcttcagcaccttagagaatcgttctctttgagctaaggcgagccaacgctgtactggtttttgttaatccactataaagaaagaaatgccgtctgaaaccttatcgtttcagacggccttggattcggatttcaagtgcaacactagtgtattagtggttggaacagattcaagaataaaacacttggcgtttcgtagccaagtgtttttcttggtcggtggttcaactcatcttgaaccctgcgtatctcccgatcactgatgttacggaaatcggtttgtttggggaagtattgccggatgagtccgttggtgttctcattcagccctttctcccaagaatggtaagggcgacaaaaataagtctccgctttcaatgctttggttattttggtgtgttggtagaactctttgccgttatccatggtgatggtgtgcaccctgtctttatgtgcctttaatgccctaacagctgcccgggcagtgtcttcggctttgaggctatccaatttgcagatgatggtgtagcgggtaacgcgttcgaccaaggtcaataatgcgcttttctgtcctttgccgacaatggtgtcggcttcccaatcgccgatacgggatttctggtcgacgatagcgggtcggttttctatgccgacacggttgggtactttgcctctggtccatgtgctgccgtagcgtttgcggtagggtttgctgcatattctgagatgttgccacaacgtgctgccgttgcttttgtcttggcgaaggtagcggtaaatggtgctgtggtggagcgtgatccggtggtgtttgcacaggtaggcgcatacttgttcgggactgagtttgcggcggataagggtgtcgatgtgctgaatcagctgcgaatcgagcttatagggttgtcgcttacgctgtttgatagtccggctttgccgctgggctttttcggcgctgtattgctgcccttgggtgcggtgccgtctgatttcgcggctgatggtgcttttgtggcggttcagctgtttggcgatttcggtgacggtgcagtggcgggacaggtattggatgtggtatcgttcgccttgggtcagttgcgtgtagctcatggcaatctttcttgcaggaaaggccgtatgctaccgcatactggcctttttctgttagggaaagttgcacttcaaatgcgaatccgccggcattttattgcccgaccggttatttgtcggtttgggtatcccgtttcaatccgccgccgagtgccttgtacaaatcggcaaggttttcggcgcgggtcagttgtgccgacaaagccgcaccctccgccgcatagctgctgcgttccgcatcgagcaagtcgagcgcgccggatacgccgtgcttgtaacgcaggccgaccaagcgcaacgcttctttagaggcgcggctttgtttgcttaaagcgtcataggctttatccagctgctcgcgcgccgccaatgcgtttgccacgtcttgaaatgcggattggacggcggattcataggcaacgatttgtacctgttggcgcagcttggctacatcaaggttcgccttgttcgtaccccaggtaaaaatcggcagggtaatagacggcgcgaacgaccaaacgcccgtgccgcttttgaacaacccacccaattcggcagaacccgtaccgacggttccggtcaggcggatggatgggaaaaaggcggcgcgtgccgcaccgatattggcgtttgcctgtttgagcgcgtgttcggcagcacggatatcgggacggtcgagcaatacttcggaactcaaaccggccggcagtttttcaacaaaaaactgcttgtccagcggcaaaccggcaggcaggtcttcgggtatcggttggttaatcaaggttgccaaggcattgcgcgcctgttcgcggctgcgcgcggcatgggcataatcggctttggcagattcgatcagggcttcctgctgacgtagggcgacggcggaaatcacgcctgccttgtaacgtaattcggacagcttgtaggtttcctcgcgcgttttcaaaacacgttgcgccaaagacatcgcttcttcggcgtaacgttcgttgaaataggctttggcaacggtggcaatcaggctcaaatgtgccgcatcgcggttggcggtgctggcgaaatagccttgcagtgccgcctcgctgctgctgcgtacacgcccgaacagatcgagttcgtaagatgccgcacccagtccgactttgtagctgctgcttacattgccgccgctcaagctgccttggcgcgagtcgttcgcattggcggcaagcgtgggcaggaggttgttgcgctcaatcatgtattgtttgcggtagatttcgctgttcaatacggcggtacgcaaactggtattgcgctcgagtgcgatgtcgatcagcttttgcaggcgcgggtcggcaaaatagtcatgccaacctaaatcgacggcgcggatgccgctgtcggcggtatcgtttttgaacgtttcggcaacttcgactttgggctgctcgtattggggaatcatggtgcaggcagacaatgcaaaggctgctgcaacagaagtcaaggtggttttcaatgtagtatccataaaaaagtcctgatgccgtctgaaaacccgtgggcgttcagacggcatggttgcttaatgttggctgtcgtccgaaccggtgatgcccgcttcggcggcgtgttttactgccatttcgtgttcgtgcgcggtttctttgaagaatttgcgcaccaccacatagaaaagcggaacaaggaacacggacaagagcgtgccgatgagcatcccccagaatacggttgtaccgatggcgcgctggctggcagaacttgcaccgccggcaatatacaggggaaccacgcccaaaataaaggcgaacgaggtcatgataatcggacggaaacgcaggcgggcggcttccaaagcggcttcaaccgcgcttttcccttgcgcttgaaggtctttggcaaattcgataatcaaaatcgcatttttcgcactcaaacccatcacggtaacgaaaccgacttgaaagtagatgtcgttggcgaacgagggaacgctgcccaacagtccttcaaacaggttgcgcccggttacgcccgcagccgcaccgatcaaacccaacggaatcacaaggatgaccgccagcggaatcgaccagctttcataaagcgcggcaagtaccaaaaatacggctgcaaccgccaaaccgtacaaaatcagggtttgcgagccgccttttgcctcttcgcgcgactgtccgccccactccaggctgtaaccgccgcccaattcgtcaaccattttttgaaccgccgccatagcctgcccggtggaaacgccggttgcaggcgaagcggacagcttcatcgaaggataaccgttgaagcgtacgctctgttccgtaccgttttcccaagaaacagtagcaatggtggaaagcggtacggcgacgccggatttgttcggcacggtcaggttcaaaatatcggcaggctgcatacgggcatcctcgtcggcctgcaccatcacgcgttgcagacggccttggttcgggaagtcgctgacataagacgaactcagcgcgcttgccaatgcggtgcggatgtcggcaaacgaaatgccttgcgccgccgccgcggcacggttgatgtcgattttcaactgcggcgagtcttccaaaccgccagcacggacggtgctggggtcaaacaaaccgctggcacgcattttctgaatcaactcgttgcgcttcgccagcaatgcggtatggccggtattgttgcggtcttgcaggttgatgctcagacccgaaccgttgcccaactccagaatcggaggcgggacgacggcgatgccaaaaccgtctttaagcgtccccatcatcatacccgtcagcttgccggcaatcgcaacggcatcgctgccgggcgcggtacgctcgttccaatctttcaatatggcaaaacccatcgccatattctgaccgctgcccgaaaagctgaagccggaaacggtaatgatgttttctatttcaggaatgcttttcgccagttgggtaacttgcgccaaagtcgcattggtgcgctcttgggtcgctcctgcaggcagttgcacgctgaccatgacgaagccttggtcttcggtcggcaggaatgaagtcggcaggcgcataaacaggaacacgcccacaaccgccaagccgatatagacaaccatcatgcggaaagtcttacgcagcactttggcaacccggccttcgtaaccgtgcgtccaactgttgaatttcttgttaaaccagccgaagaaaccttttttctcttcgtgatgccctttcgggattgtcttcaacattgtggcacacaaagcaggggtaagggtcagcgcaaggaaggcggagaatgcgattgatgacgccatcgtcagggcaaactgtttgtaaatattgcccgtcgccccgctgaacatcgccaacggtacgaacacggaaatcagaacggcggtaataccgatgaccgcgcccgaaatctgacccatcgcttttttggtcgcttctttgggcggcaagccttcacccgccataatgcgctcgacgttttcaaccaccacaatcgcgtcatcgaccacgatgccgatgaccaaaaccatcgcaaacatggtcagtacgttaatcgacatgcccatataagagatgaaggcgaaaccgcccaacagcgaaatcggtacgacgatggtcggaatcagcgtataacggatgttttgcaggaagagatacattacgacaaacaccagcaccatcgcttcgattaaagtgtgaatcactttttcaatcgaaatttcgacgaatttggaagtatcgtaaggggttttccagctcataccctgaggaaagtatttttccaacgtcgccatgcgttctttaaccgcctttgccgtcgccatcgcattgccgctgttggacagcatcaccgccataccggtggtatttacaccgttcagacgggttgaggaagaatagtcttccatacccagtccgacccttgccacatccttcaggtaaacattagaaccgtcggtattggcgcggaggatgacgttgccgaattcttctgccgtacccaactgcccttgcgccgttacggtagccgtaaccgtctgtccgcgaacggcgggaagcgaaccgatagaacccgctgaaatctggacgttctgggcggacagcgcgctgccaacatcggcaaacgacaaattgtagttttgcagtttcttaggatcaacccaaatccgcatcgcgcgttgcgcgccgaacaggcgtacctgccccacgccttcgatacgctgcaactcgggaacgatattacgctgcgcgtagtcgttcatctcttcggttgactgcacatccgacgaaagcatcacaatcatcaggaaattggaacgcgccttggatacggttacgccgtattgctggacagttgccggcagcgtgctcaatacttcggaaagcttgttctgcacttccacctgcgccagattctcgtcggtatcgggcgtaaaggtcaggctcacgctgccgctgccgctcgaatcggcggaagtggacatataatccaaaccttccacgccgttcatattccgctcgatcacggaaagcacgctgtcttccattacctgcgcggacgcgcccggataagtggccctcagggtgatggtcggggcggcgacggacggatattgcgaaaccggcaggcttttgatgccgaaaatacccgccgcaataatgaaaatcgaaataacccacgcaaaaatggggcggtcgataaaaaatttagccatcgatgccttccttatttcgcttcagaagcaggtttggcttcagatgccgtctgaacgccggattgaggcgcggcggcttggttttcagacgacgcccattctttgggcgttacctttttcgcacccgttataccggcgatactgatgccttccacaaccaccttgtccccgtccttcagacccgacgtaacaatccaattcgtaccctgctgttgcgcaaccgttacctcgcggggttccataccgccttgggcattcacaatcatcacggtatctttcgcaccgcgcgttaccgcctgctgcggcacaacaaatgcgttatccaccgccacttggtccatcagcacgcgcacatacagaccgggcatcaagatattctgatcgttcggtacggcggcgcgcagggtaatctgaccggtcgattcgttgacggccggatcggcaaacagcaggcggcctttttcagggtaaactgtgccgtcgtcaaatttgatgccgaccgcaatcacaccatccgccgccagcagtttgccttcggctatctgacggcgcaatttcatcacttcggatgcagactgggtaacgttcacatacatcggattggtttggcggatggtcgccagtacggtcgcatcgccagcgttcagcaacgtaccttcggaaactttggactgaccgataaagccggaaatcggcgcggtaatgcgcgaacggttcaggctgatgccggcggatttgattgccgcctgcgccgctttaacgcctgcctcggcagaacgtttcgccgttaccgcagcatcgtattcctgccggctgacggcttcggcggcaaccaaaggcttgtatcgcgccaaatccgcatccgctttggcaagcgttgcctgagccgttgccagttgcgcgcgcgcgctttccagacctgcttcataagtggaactgtcgatctgatacagcggctgtccggcacggacataactgccttcttggaacaggcgtttttggatgatgccgccgacttgggcgcggacatcggcggtacgcagcgattccaaacgccccggcaactcgacggtcaatgcgacggtttgcggatggacggttacgacaccgacgacgggcgcaggggcttcccgaccagcaggctgcccgccctgcgccgcgtctccgcctttaccgcaagacgacagtaccaatgcaacggcggcagccaacgcggccgcacgcatcgccttaaaagcataaaaagccattatttatcctatctgtctggtttgatgtaaagggttttgccaatcaacaggcattcttatagtggattaacaaaaaccagtacggcgttgcctcgccttagctcaaagagaacgattctctaaggtgctgaagcaccaagtgaatcggttccgtactatttgtactgtctgcggctcgccgccttgtcctgatttttgttaatccactatatttcaggatataaaaaccgcctgcttcgccaacccgatgttcaaacgggttgcgaagcaggtttcatgggttttcaaagttgagatgtagtctcaatttcatgggtttcattatacatacacgattgcatggttacaaagtcttttttataatccgccctcatcaaaccgacccgaaacgaaaccgccattatgagaaaaaccaaaaccgaagccttaaaaaccaaagaacacctgatgcttgccgccttggaaaccttttaccgcaaagggattgcgcgcacctcgctcaacgaaatcgcccaagccgccggcgtaacgcgcggcgcgctctattggcatttcaaaaataaggaagacttgttcgacgcgctgttccaacgtatctgcgacgacatcgaaaactgcatcgcgcaagatgccgaagatgccgaaggagggtcttgggcggtattccgccacacgctgctgcactttttcgagcggctgcaaagcaacgacatctactacaaattccacaacatcctgtttttaaaatgcgaacacacggagcaaaacgccgccgttatcgccattgcccgcaagcatcaggcaatctggcgcgagaaaattaccgccgttttgaccgaagcggtggaaaatcaggatttggctgacgatttggacaaggaaacggcagttatcttcatcaaatcaaccttggacgggctgatttggcggtggttctcttcctgcgaacgtttcgatttgggcaaaaccgccccgcgcatcatcgggataatgatggacaacttggaaaaccatcccgacctgcgccggaaataatcaagccttggtagcaatgccgtctgaaacgaacaaaccctttcagacggcatcaaaatgacacaaagccttcttctaaaaatacatattgagacctttgcaataacataggttactaaaattttatgctcaatcttattttcaaaatgcaaaacttttctgatttttcctactttttgctcaatattaggaaggttttaggcaattgaaaattttttggcgcatttttatgcgtcaaatttcgttaacagactatttttgcaaaggtctcatattcactaaattgcatttttaatttcttctatcattgcatggacattctcttggtcaaaatgtccgttttcttctgaataaacttctaacaaataatgttcaatgaacgttttatctgtcgtcagcgatacatctctggcaatgtcttcatacgactcaaaatcatcttcatgccagggattatatttgtccatatttttttgaatttcatttttcatatcatttaccttccaatatttatttacaattaataacaataccattcaaaatgtaaactgcatttttctccagcatttttgcaaataaaaactgaaaatcccgccatttccgcgaaaacgggaaaccgttttttgagttccagtcattcctgataaggctttaacgtcaagttttcggattaccgcctttatgagaataacgatgtgggcattttctgttttaatctattgcggttatatacatatgcgattattttagtttgcttacaaaacacttcatgttacattcaaaaatttaatgcactcaatatatttttttaaggagaagcagatgagtcaaaccgatacgcaacgggacggacgatttttacgcacagtcgaatggctgggcaatatgttgccgcatccggttacgctttttattattttcattgtgttattgctgattgcctctgccgtcggtgcgtatttcggactatccgtccccgatccgcgccctgttggtgcgaaaggacgtgccgatgacggtttgatttacattgtcagcctgctcaatgccgacggttttatcaaaatcctgacgcataccgttaaaaatttcaccggtttcgcgccgttgggaacggtgttggtttctttattgggcgtggggattgcggaaaaatcgggcttgatttccgcattaatgcgcttattgctcacaaaatcgccacgcaaactcactacttttatggttgtttttacagggattttatctaataccgcttctgaattgggctatgtcgtcctaatccctttgtccgccatcatctttcattccctcggccgccatccgcttgccggtctggctgcggctttcgccggcgtttcgggcggttattcggccaatctgttcttaggcacaatcgatccgctcttggcaggcatcacccaacaggcggcgcaaatcatccatcccgactacgtcgtaggccctgaagccaactggttttttatggtagccagtacgtttgtgattgctttgattggttattttgttactgaaaaaatcgtcgaaccgcaattgggcccttatcaatcagatttgtcacaagaagaaaaagacattcggcattccaatgaaatcacgcctttggaatataaaggattaatttgggctggcgtggtgtttgttgccttatccgccctattggcttggagcatcgtccctgccgacggtattttgcgtcatcctgaaacaggattggtttccggttcgccgtttttaaaatcgattgttgtttttattttcttgttgtttgcactgccgggcattgtttatggccgggtaacccgaagtttgcgcggcgaacaggaagtcgttaatgcgatggccgaatcgatgagtactctggggctttatttggtcatcatcttttttgccgcacagtttgtcgcattttttaattggacgaatattgggcaatatattgccgttaaaggggcgacgttcttaaaagaagtcggcttgggcggcagcgtgttgtttatcggttttattttaatttgtgcttttatcaatctgatgataggctccgcctccgcgcaatgggcggtaactgcgccgattttcgtccctatgctgatgttggccggctacgcgcccgaagtcattcaagccgcttaccgcatcggtgattccgttaccaatattattacgccgatgatgagttatttcgggctgattatggcgacggtgatcaaatacaaaaaagatgcgggcgtgggtacgctgatttctatgatgttgccgtattccgctttcttcttgattgcgtggattgccttattctgcatttgggtatttgttttgggcctgcccgtcggtcccggcgcgcccacattctatcccgcaccttaaacacgataaacaaaatgccgtctgaaatgcttaaacgctttcagacggcatttgcctttctatcccgtcaggcttctccggcctcttcctttttttccgctgcggcaagcgtgtcggcaagcagacggacgaggttttcaaacaggggctgttcgagcgggttttggcttgcgttgccgaacacgagggcgacttcggtatagtctttctgccctttgctgactttgctgccgtggtaggcggtttgggcttttttcagggcggcttcccaatcttgtttttgggcaaacgcttcggcggtggcaagcgaggttttggcaaaaaacggcagcgggcggttttgcccgatattgaaaaacgccatccattccgacaatagctgcaatgccctgtcttgcgcgatttccgccaatatttcggtttctccggattggacgataaaggtttgccgcatttcggcttcagacggcataacggcgcaaaatatcaggtgttccagcagaaaagcgatacgttgcggcgcgttgggtttgccgtaggcgtaaaacacttgtccgcagcggtacagattgcccaagctgcctttcaggatttgcccgtccgacggtatggcatatgaaagcggtggcagtttggggctgtttaaaaccgccgtgtcgatttgtttggcagcagtttggaagtcctgctgccaaagtctgcccaactctcccgacggcaggaggctttccgccccgatgcgggcggcggtttgggcaaaatcccgtccttcgcaccgtgcttcgatgtagatttcggcgatttgatcggcgtgttgcggctcgaagggttcggcaggctcccaggcttcgccgatatggggttcgctccacgcaagctgctgctgaagccatactttgacagggttgcgccagaaacggataaattcgtcctgtccgatttcggcaacaggttcggcgttttctacgggttgatcgaaaaagggttgcggcggttcgggcgtttgtccgagcgcggcggcgtagtcggtacgcgtgccgaatatgccgtctgaacgtccgccttcttgaaaatatcggcgcgagaaggcttgcagcggatgctgttctatcaggttttgtgcaagttggcggctaccgatgcccgccatagcggcaacggtatcgatgagttcgcccaacagggaagacggggcaagctcttcgtctttgcggatgtcgcgcccgatgtaggacaggtagaggatttcacgcgcgctgatgagggcttcgaggaacaggtagcggtcgtcatcgcggcgggcgcggtctcctttggcgggatgtttggcaatcaggtcgaatacggcggctttggtattacggggaaaatctccgtcgttcaaacccaacaggcagatgactttgaacggcaggctccgcatcggcaccatactgcaaaaggtgatgccgccgcgtaaaaagcctgcctcgctttcgctgtcgagaaagcgtcggatatggcggatgacggtgtgcggcggcaactgtccggaaaattgcgccaattcggtttccgcctgccatttgacccattcgttttcaaggttttggactgacttttggtcatcggcttcagcttggaacaatgtttcaagcaaatcccggcaacgcgccacccattcgccgaccgttgcgggctgccgccatatccgtacaatatccgtcagggtttcgaggaaggcggcaaaacgtccgaacatggcggtttgattcacgtcggcataccacgcgctgacatcctgccacatcggattgccgcctttgggcagcatccagcccaatatcatgcgttctaccgcctgcttccaggtgaacagctgatccgtgccgccgcgcatttctccgtccaaaccccagtggacgttcaaatcggcaaccatgtcgtgcaaaagcggtaaatcgtcctcagtcagtccgaaacggcgcaacacgggcgcggtttctaaaagcacaagcactttatcgacttcaaatcggctttccaacaagtcgaacaggcatgacaaagcatgaaacagcggttggcggcggctgattttcacgtctgacacggaatacggcaatgcctgcgcaccgggctgcgcctgtccgaacacggcttcgataaaaggcgtataggattcgatattcggggttaatacggcgatatcgtgcggctgccaatcgggatgttcatgcagaattttcaacagcttgtctttgagtatctgcaattcgcgcaaagggctgtgtgcggagacgatgcgtatcgagccgtcgcccgtgttgacgcttcccgccatttcagacggcattttcaggttttgaatatcggtttgcagggcgtgtaaaagcgtatcgcgcccgccttcctcaaataccggcgtttcgccttctatttccatttcgttcaaaaagtcgaaaaagtcccgcccctgcttgcccaatgaggcgagcagcggatgccctgcctgagttaaatcgggatcgccgccacctttgaggatttgcgccgcttcgatgacgttgccccagtacatcccgctcggattgagtgcgaacacgaacacgtcgcaatgttcggacagcttgtgcaaaagttgcaaatacatcggcgccatcgtggaaatgccgaacacgaaataacgctcgggcagcttatcactgctcaaagattccaacagcttttcccacaacgcgacacggtgcggcgcgctctgcctgccgtcgtcgaggtaacgccacagtttggactgccagatttcgtcgtcgcccaaaccgagccgcctgccctgctgccaagcgtctatccactgaggacggtacacgaggtattggtcgaatatgtccgcaagctgtcccgcaagctggtaatctgccgattcgccgctgcccagatagtcttgcagcacattcctcacatcttcaaattctgccgtattccgaaatgcctcgctgcggaacaaatccagcagccgccagcgcatgacttcgggcgcaaacgggctgagttccggaataccgggaatcagttttttcatcagcttccacgtcaggccggcgggcaggctgaacgacaaattcgccgccacgcccaaatcgcgggcgaggcaggtattgaggtagcggcgcatcccctgactctgcacaataatctgttcgggctgtaaagccgatttcagcggtttgactttttgaatgcgggcaaacaatgccgccagcgtttcaagacggttggattgatacagataaaacatgatttcaaacagaagctgtggtcaagtattcgggattatatagcctttcccccgtccgccttcaaacaaaatgccgtctgaacctttcagacggcatttggtcatttaaaccatctcctcaaaacaggaatccgcgacaacagcagcgtatccaacagccaaatcacggcaatggcaagcagtgaggtcgggaagagcagtgcgattgccaatagcggcaatgccatcatccaccaaaccggcagcttgactttctgcgccggcggaacgatgcccaccgctccggtcggacggcgtttccaccacatcacgcagccgctgataccgataaaaatgacggcaaggcagaacaagacgttcgccaacacgctccaccagcccagagtccccatatgcagcgcaatgcttgccgccataaatttgccgaacgggttgtaatcgtcaaaacggatgtcggcaaggattttgccgctgtactggtcgatatgtaccgtgcggtcggcaaacgggctgatcatgtcgtaactcatagaatcctgcgacaaagtccatacgccgtcctcgcctttgggcaaattcaactgataacgccctttgaaaccgatttcccgcgcaaagcggtcgacggtttccaatgtcatcggctcgtcagggttaatgccgtctttgcccacagtcgtccctgaaacaggcataggcgtaagctccaaaacccacggcacttccttaaccttgccgtcattcaatacctcgccgtgggtcggcacgactgaaacggggttcggttcgacaccccatttaccggcagggaactgactccaagcctgtacgaacttgccgccccaaatacccgcccaagcaatacccgacaggcagaacaacagcaaaatcaacgacacccaagttccaaacgtgccgtgcagattccgccaccaagaacgcgccctgccttttgacggcagcagcatcgccttgatgccgcgccgtttcacccaccaaaggtacaagccgctgacaaccataataatggtcagtgaagctgccgtttccaaaagataatcgcctgccgcaccgagcatcatatcgctgtggatttcatccatcgtgtaataccaaccctgattgcgcggcatggtactgaccacttttgccgtataaggatcgaccgcgaccatcgttgctttgccctcattgttgacacggaacacggcaaccatatcatcggcacgcggcgcaatatactgaacgacggacgaagtttccggattaacggcactgcgtgccgcttccgcctgaacagacagaggttgtaccgttgcctgcggcacaacatgaatccgctcgccctccttaccggtaatattggcaaacagcagcatacccaaacccgtaacggcaagcagggtaagaaaaggcataaccagcagaccggcataaaaatgccaccgccaaacggtcagataacgccggttgctctgattgtcggcttcagttttgatttgtgtatccattaatcgtccttttgaaaatagggctatcgtgatgatgcgcgattataaacaataaagactaattctttatgactaaagtcaaaattcattacaacaaataggcagtctgcgtttaaaaccggatgcccgttaaaacaaaaaatccagattcaatactgaatctggattttcataaccgataatatcggaaactcagtcaagttagaatttgccgcctgactggttgaccatatagtcaaccgcagctttaacctcatcatcgctcaaatcgccgcgaccgccttttgcgggcatcgtattgaaaccttcgatcgcgtgtttgtgcaacgtgtccttgccttttttgatgcggtcggcccaatcggctttgatgcctacatggggaatacccggaatcgcattgccatggcaggcggcacaaacggtttcataaacctatttgccgtccgctttggcagcaggtgcagctttttcctcggctttaggttctgctgcggcaggtttggcttcggacacggcttgtgctgcttctgcaggagcagaggctgcgggttctgccgccggtgcgggagtcggtgcaggctcggcttttttcaccggagctttaccgtctttatcggaaagaccccatacataagcagtcataatatgcagtttgtctttatccaagaaatgtccccaagcgggcatttggctgctgcgaccgttggtaatggtttcgataatggatttttgcgtaccgccccacaaccacacgtcatcagtcaggttcggacccaaaccttggataccttgtcccttatcgccgtggcaagtgaaacagttggcaggcggaccgctgaacaaggcttgtccgcgcgcggcacgttcctcatcatactgaccttcgggttttgaaagggacatcacataatgggcaacgtctttcacgccttcttcgcccaaagcaggaccccaggcaggcatagtcgcaacacggcctttttcgatggtctcgtggattttatcgggatcaccgccccacaaccaatcgctatcggtcagattcggaaaacctttagagcctttagcatcagagccgtggcactggatacaataagtgttaaacaggttttgggcgatttgcttggcttgagggtcttttgccactttttcaatcggcatatccgcaaacttggcatacagtttgccgtattgctcatcggcttttttgacctctttttcatattggttatggctggtccatttcagcagacctttgtagtcgccgacacccggatacataaccaaataaccgataccgaacagccacgtcaaaacacacagccaaaaccaccagcggggcagcggattgtcgtattcggcaatgccgtcccactcatgacccgtagtttgtacttcttcgcccttcttcggacgtttgacaacattttgagacagcagcagccaagccaaagcgataaagctcagtaagacaataactgcaatatatatattccagaaattactggtaaattgggatgttgtgttcattgttttgctccgttatcacaatattaacggttttcgcttttcttatcttgcgcatcttggttttcatcaaaaatgctgtttgcggcattatcgtagtttttcttattccgcctgttgaagacgatatagagtaccaacaggaaacagataaagatccataccgtgaagagagcacgaataccgttaatatccatgatgttaccttacgtttttcaaagccagacccaatccttgcagataggcgactacagcatccagctcggatttgtttgccaaagcctcaggtgctttcgcaatttcctcatcactgtaaggagtacctactttacgcaaagccttcatgttggcaacggttgcatcgacatcgactttattgcgtgcaagccacgggaatgccggcatattggactcaggcacgacatcacggggattcagcaggtggatacggtgccattcgtcggaatagcgaccgcccacacgtgccaaatcaggaccggtacgtttggaaccccattggaacggatggtcgtaaaccgactctccggcaacagagtaatgaccgtaacgctcggtttccgcacggaacggacgaatcatttgcgagtggcagttgtaacagccctcacggatgtaaatatcgcgtccggcaacctgcagggcattgtaaggcttcacgcccggcgccggctgtgttgccgccttggtaaaggccaagggcacaacttcaatcaacagaccgacactgactacaagcagcgtgaacacaatcagaacgccgattttttcttcagccaattgttgtaatttcattttggtagcctatctttcttagtattttagtggtgctgtgtttgggaaaccgcagggatttcggcatcgactgctttaccaccgatggctgtgcggtacacgttgtacgccataatgcacataccactcagatacaataaaccacctgcaaaacggatcacgtagtaaggcatggtgcgttttacggattcgacaaacgagtaggtcagcgtaccgtcatcgttcaaagaactccacatcaaaccctgcatcacaccggcaatccacatggcagcgatatacagaaccacgccgatggtcgcaatccaaaaatgtgcttctaccagcttggtgctgtgcatctgttctttgccgaacagacggggaatcatgtaatagacggaaccgatggttacaaagcctacccagcccaacgcacccgcatgaacgtgcgcgacggtccagtccgtatagtggctcaatgcattgaccgttttaatcgacatcatcgggccttcaaaggtagacataccgtagaaggacaaggatacaatcaggaatttaagaatcgggtctgtacgcagtttgtcccacgcgccggacaaggtcatgatgccgttaatcataccgccccaagagggtgcgaacagaatcaaagacagaaccatacccaaagattgcgtccagtcaggcagcgcagtgtagtgaagatggtgcggacccgcccacatataggtaaaaatcaacgcccagaagtgaacgacggacaggcggtaggagtaaacggggcgggctgcttgtttgggtacgaaatagtacatcatacccaagaagccggcagtcaggaagaagcccacggcattatgcccgtaccaccattgaaccatagcatcaatcgcaccggaatagacggggtatgacttcatcaaaccggccgggatgctgatattgttgacgatgtgtaaaagtgcgaccgccaaaataaagccgccgtagaaccagttggcaacgtaaatatgtttaatcttacgtttggcaatcgtaccgaagaatacgatggcgtaagccacccaaaccaaagtaatcagaatatcgatcggccattccagttcggcatattccttaccttgggtccaacccatagggaagctgacgacggcggcaacgattaccgcctgccagccccaaaaggtaaatgccggcagccaaccgccgaaaagacgggtattacaagtacgttggacaacgtagtatgatgtgccgatcaggccgcaaccgccaaatgcgaaaataaccgcattggtgtgcagcggacgcaggcggccgaagtggaaccaaggtccgatattagacaagtcgagggcaggagcaaaaagctgggcggcgacgataacgccgaccaacatacccacaatcccccaaactacagtcatgatggcgaactggcgcaccactttgtagttgtaagtttgtgtgtccatgagagtctccatgaatttatgggaataaagatttttatcctgccgcttccgcagcctgtttaaggtgcaatccgggcaagcgtaattttttctaaatttaacatatctgccttattacgccaagcggaattacattcgcaccgccgacgagccctttgcttaatctgttttttattacatataaatcatattgttataataaattacaacccgaccgccattgcttttgtttccaattttccctttttgtggcactttattgatgtaggttaagctgcattttaaaggtatttaatccatcccgtttaacgatatatttgatagttatgattcattataaaataaccccgtcccctctcgaccacgagtggcacatcctgctgacattcacacaagatgatgatcttcctatagaaataagcctgccaaactgggttccgggcagctatctgattcgggatttttcccgccacatcacttctatccatgcatcctgtaacggcacgtccatgccgctcgaacaaattgccaaaaaccgctggcatgccgccgccgtacgcggcgagtggcaaatccgctacaccgtatatgcattcgatttgtcggttcgaggttctttcctgacgacagaacgcggtttttttgacggatcgtgcctgtttttgaaagtcgaaggaacggaaacgctgccgcaccgcttggaattgacgggtattccgtccgaatggcgtattgccacaacgctgccggaaacagggaggtttgtctttcaggcggcatcttatgccgaattgattgaccgacctgtcgagatgggcttgattgaatttttagattttgaggcggcaggcattccgcacacaattgccttaagcggcatatatcccgatttcgaccgcaacaggctggtttcggatatcaaaaaaatctgcgaaacagaactggcggtgttttcctcccctgccccgtttcaaaaatatttgttcctgctccacgtcggcgaccatatttacggcggtttggaacacaccgacagcaccgccctgctcgccgaccgccacagccttccgccgtacggtatgaccgatgccgacgatacctacaccacattgctcggacttttctcccacgaatattttcacgcgtggaacgtcaaatccatcaaacctgccgcgttcgtcccttatgacctcgacaaagaaaactataccgaacaactatgggcattcgaaggtattacatcctattacgacgatttgtttttggcacgcagccgcaccatctcgcccgaatcttatttaaacctgctggcacaaggcattacgcgcgtacaacaaacccgcggccgtttgaggcagaccttggcggaatcgagttttaccgcgtggaacaaattttacaaaccggatgaaaacagccccaacgccatcgtcagctactaccagaaaggcgcgcttgccgcattgtgccttgatctgataatacgcaaccgaagcaacggcagacattctctcgatacgttaatggacaaactctatcgggagtggagggacacacactcgggtattccggaaaaacactggcaaatccgctgtcaggaaattaccggcttggatttggaagattttttccaaaaagcgttatacagtaccgaagatttgccgcttgccgaatgcctggcaaccgcaggcgtgggactgaccttcctgccgcttccccgacaacacggcggcggatacgcagaacacatctgccccgtcccgtcggcaggcgattttggcgcacgtttcaaacaaaacaccgaccacatcgtcctgacccatgtcttcaacggcggcagcgcggaatctgcggcactgtgcccgcaagacaaaatcattgctttagacggttatgcctgcaccgactttaccgcacaatgggcccgataccacgtcaatgcaaaaatcaatatccacttcttccgtgccggcatattgcgtcaaaccgtcttgacggttcaggcagcggcagcggatactgccatcctacatatcacagaccggaacctgttggacaactggttgttcggttaaactttcagacggcattgcacacaaaatgccgtctgaaaaacaaccgcaaagtaaaggaaacaaaatggccattctgaaacttgacgaacacctctatatttctccgcaactgaccaaagccgatgcggaacaaatcgcgcaactgggcatcaaaaccgtcatctgcaaccgccccgaccgcgaagaagaatcgcaacccgacttcgcccaaatcaaacagtggctggaacaagcaggcgttactggattccatcaccaacccgttaccgcacgcgacatccaaaaacacgatgtcgaaaccttccgccaactcatcggacaagccgaatatcccgtccttgcctattgccggaccggtacgcgctgctccctcctgtggggcttccgccgggcggcagaaggtatgccggttgacgaaatcatccgccgcgcccaagcggcaggcgtaaatttggaaaacttcagagagcggctggacaacgcccgcgtctgattacaagccgaaacgtttaaaccacaccttcaagcggcattccaccgcaacttgaaaaagaggacggcaaaccttactgccgtcctctgtccttctccgtttttacagtgggagacctttgcaaaaatagtctgttaacgaaatttgacgcataaaaatgcgccaaaaaattttcaattgcctaaaaccttcctaatattgagcaaaaagtaggaaaaatcagaaaagttttgcattttgaaaatgagattgagcataaaattttagtaacctatgttattgcaaaggtctcagtgggtatagcggattaacaaaaaccagtacggcgttgcctcgccttaactcaaagagaacgattctctaaggtgctgaagcaccaagtgaatcggttccgtactatttgtactgtctacggcttcgttgccttgtcctgatttttgttaatccactataaaaattagaaatgcacattttcattattctcgcgcaggcaggactccagacttacccatttcagtaatgtttgaaaataaaagaaaaatcagatgtttgtattcccgcctgcgcagaaatggagacggtgctctgtcgtctcatttttgttttaatcaactatatatagctgattaaacataagaaatgccgtctgaaagactttcagacggcattcgttcaagcgtcgaactttattgcgccttggtttcggttacaaaaccgattttggtgattcctgcctgacgggcggcttctaaagctttgtttacataatcgtattccaccgccttgtctgccgcaatcgccacaatcacgttttcattctgctccttggcggctttcagacggctttccacttccccgatttccactttgcttgcagaatccccgccgacataatagccgccgttcgcatcaatcgtcaggcgcagggggtctttaggctgtttgtcctgcttgtttgtctgctcggacgcggtcggcagttccaaagggatggaatgcgtcagcaccggcatagtaatcataaacacaatcagcaacaccagcatcacgtccaccaacggcgtaacgttgatgtcggacatcggagaatcgtcgccggaattcatcgaaccaaatgccataatcagctatccttttgattaagcaggcggacgtgcaaatcgtgcgccatcgcatccaaatcctgggtcagtatttttgtgccgcgattgaggaagttgtatgccaacaccgccggaatcgccacgaacaaacccgccgccgtcgccaccagtgcctcgccaatcgggccggcaaccgccgcaatactcatctgcccgctttgcccgatattgatcagggcgtggtaaatcccccaaaccgtgccgaacagcccgataaacggcgcggtcgcgccgatggaggcaagcgcggtcatcccgtaatcaaaccggcgcataatctgcgccatactgttgcggatttgaatgaccaaatactcgttcaacggcaaagcctgcgccagttcggacgcttcgtttcggcggtagttgcggtaagactgcaatgcctcttgcgccagtttggacaaaggcgcatcgacggcgcgcactttttcgaccgcgtcgttcagcgacaaagtatcgcgcatatgccgtttgacggcggcattccctttgcgcgcccgatacagcttgatgcagcgcaagacaaccaaacaccacgttacgatactcatcaacagcatcaacacaaacacaccaatcaggacgggatcgcccgattcaaacactaatttcaaattcataatgattccaacactgaaaaaaccaatcaaacatccaagctgccgcaaaccgctgcggcaaccgcctaattcaattcaaacttgacggggactttaaactccgtccaggcattggcttgaaaatgcccgttttgcgccgccttgcgtgccgcattgtccaaccgggaaaaaccactgcttttcacgattttaacggactcaacatgaccgcccggagaaaccaaaacgctcaaaacaaccgtaccctgctcgtcattctccatagaaagcgtgggataagccgggcgcggaatgctgccgttggcgcgtaaaggattgcctttgctgctgccggctccttccccgtgttcgcctttgacaccgccgctacctttaccgctgccttctccgcgccccgttccgtctcctttggtaccagttcccttatcttccccattgccctgctcgctgtctgctttggcagaagcattgccgggatgttcggcaggtttttcagacggcttctcgaccggtttttccgccggtttcgggacaggcttcgcttccggcttaggctctggtttcggtttttcttcgggtttcggcttttcttcaggtttcggctcttccttaggctgctgaatatccgcatccgcctttttcgtaaccaccggcttcaaaaccggcttgggcggctcgacaggtttgggcggctcgggcacgggttgcggttcgggcgcagcaggcgcgcctgcaccttcgggggcgccgtcccctccgccaaaatcgcccaaatcgacaaattcaataacattgcctgactctatcacgggcagcttgtgcgcctgccagagcaatgccaccattgccaaatgcagcagtgcgacggaaaacacgactgcgggggttaaaattcgttctttatccataattcgggcataataatagcaacaattcctatttgcaacctatttttacaatttttggtcatatgaatgtctgttccgttcacaggcaaaccgtgtttaaacgctgtattacagcaaatcatcagataacgggccggcagaaaaaatgattccgtctgatttcttattccaataaaatcaggttagatgatatattgccgcttctgtctgtcagccgtttcgggctgcacaccacatctgttcaaaggaaaaccatgtttcaaaattttgatttgggcgtgtttctgcttgccgtcctgcccgtgctgctctccattaccgtcagggaggtggcgcgcggctatacggcgcgctactggggagacaacactgccgaacaatacggcaggctgacactgaaccccctgccccatatcgatttggtcggcacaatcatcgtaccgctgcttactttgatgttcacgcccttcctgttcggctgggcgcgtccgattcctatcgattcgcgcaacttccgcaacccgcgccttgcctggcgttgcgttgccgcgtccggcccgctgtcgaatctagcgatggctgttctgtggggcgtggttttggtgctgactccgtatgtcggcggggcgtatcagatgccgttggctcaaatggcaaactacggtattctgatcaatgcgattctgttcgcgctcaacatcatccccatcctgccttgggacggcggcattttcatcgacaccttcctgtcggcgaaatattcgcaagcgttccgcaaaatcgaaccttatgggacgtggattatcctactgctgatgctgaccggggttttgggtgcgtttattgcaccgattgtgcggctggtgattgcgtttgtgcagatgttcgtctgactggctttcagacggcataaacgctccagaaaacgcggcaggacatattgccctgccgcgttttcctgtagtgtaatcttatttttttcatcattattagaaccaggttgcatgataatacctttcattaactgaaacactgattaagaaactccagtctgtctaatgatgaggttttcacatcgccaaaacttgccaatcaaatgctggatttattgccgtctgagatttggtcaaatccaaaggcgacattcttagaccctgtgtgtaaatcaggggtatttttgcgtgaaatcgtcaaacgcttggatgaaggcttgaccaatcaaataccagataaacaaactcgcattaaccacattttaaaaaatcaagtttttggaagtactgccacgtatgtaggtagctttgaccgatatttgcataaaaactcctttgctggtgaaaggaattattttgccaattttaaaatatttctggcaccaaatagtacaatgacaaagacaatcatgccaatgattaaatcaggatagctagaatgagtcaataacgtcaatgctcccgccgctatcacaccgatattgatgataatgtcattggatgtaaaaatcatgctggctttgatatggatttctttattttgatttttgctcagtagatataagcacagccagtttgcaatcaatgccaaaaatgccgtgccaatcatcagttgataattgggcagctgctcagcaccgataaaacgcctaatcacttctatcaccccaaataacgccaatattatctgcgttatccccgccaaaaatgccacacgttttttatacgccagcgtcataccaatggctgatagcgccaatatatagacaaagctgtccgccagcatatctagactatcagcaatcagccccatagaattagcaaaaataccaaccgaacactctatgataaaaaacacaaagttaatcatgagcacttgatataataatcttttttctaagtgctcatcaggcttgttaaacactatcttatcaacaatcacttcggtggaaatgatatgactatcaaaattaagcggttcaagtacttgtaaaatcgttgtatcttgattatcgtgatagacggttaagcaccgcccagcaatatcaaactgtaattcataaatatcagacacatcttttaaacgcatgcgaatgagctgttcttcggacgggcagtccattttggtaatgttaaaaatggtctttttcatctatttagttccttgttttgatcaggttggctcaaataaatctgtgtttatattgctgcttggtaatttttggatggtttgagtaaattgattaggttaaaatttacctttggaagtaccgccacgcataatagtttagatatgtttataatctctggataaaaaaacgtaataagtgcttactggataacaaagtccaaaccaatagcaggcaaaataaggcatccaccccccttcttcattaaggatatatattgagaaacaaatcgcaactaaacagaaaaaacttgggagataaagccatttcattcccctattcaagaatctagccaagataggtattttgtattctacaaaaaagaaaggcatttccaagggaaacatgtcagataaaaacttttgtttattttttactatagatagaaccttgcttctcaagagaaagccattaataataccgatgacagctattaatatatagagaatagtataagtatgaataatcttcattagacaaaaagaagaaatggcagataaattacatacgatatattggaatataaaatatttacggtctaaaccttgttcagttgcaatttttttaaaattgccttgcataaaaaaatcaaaggcgtccattaaactatctttcacattagaaatttaaaagctaaataatacgacaaacaatgtgaagtactattcatggtttatttaaaaaataatactattctgaacattatttagatacagaaattaacaaattagaactaaacaagcttttaaatactttaattttattggaaagctataaaaggaactataactttacacactagtcacttctttttaagaggcaaaagggattgggaaggtcgtcttggagataagcactggtatttcggccaatggtaaatagagtttacctcaaatagggtagaacctccttcatctgtcagttaataacagccacttttacaatgccctgtcaaaataaagcggcacgcccgatttttcactcatcgtcatcaaataacccatcaccttttggggccattcgatgccgcgcaccacggtcagattcctcaaaacggggaaaaccaaaatatcctccataccgattccgccgttgatgccgtctgaagcaccgtccatcaaattttccaactcttgcaaatctgcgtttatccgttcgaggtattgggcggttttattcaaattggcggaaaagctgccgatgcttttctcttttttgtctgtaaaatatttcaccgcttccggcgttgcaaattcaggcagcccgattttgatcacgcgcggctgcaccagtttgtcgttgtatccgcccaccttgtccagccacgcccgtatctcggggcggacttcgtctttcagacggtcttcgcggtcgaaatgccgcacaatgtccaaactctcgcccataaacgaaccgtcttctttttgcaggacgggcacttgtttcgcaccgatcataccgatcggcgttgcctcgtcgtcgtttgccagcacggcttcttcaacgtccgcgccaaacagcccggcagccatccgcgcacgcacgcaaaacgggcaatggtcgtaaatatacagtttcatcaaaatattcctcgtcaacctgtcggtaccgactaccttaacaccccgcgccgcccgaaacaagtttatcttcccgcctatgcaccgtaaataaataagctgttacaataaactcgtttttatcggaacggaagaccccatcatgaccgccatcagcccgattcaagacacgcaaagcgcgactctgcaagaattgcgcgaatggttcgacagctactgcgccgctctgccggacaacgataaaaacctcatcggtaccgcatggttgctggcgcaggaacattaccccgccgatgccgccacgccgtatggcgagccgctgcccgaccacttcctcggcgcggcgcaaatggttcatgaactcgacctgctccccgatgccgtcgccgccaccctgcttgccgacatcggacgctacgtccccgactggaacctattggtttccgaacgctgcaacagtaccgtcgccgagctggtcaaaggtgtggacgaagtgcagaaactcacccacttcgcccgggtggacagcctcgccacgccggaagaacgcgcccagcaggcagaaactatgcggaaaatgctgctggcgatggttaccgacatccgcgtcgtgttaatcaaactggcgatgcgtacgcgcaccctgcaatttttaagcaacgcccccgacagccccgaaaaacgcgccgtcgccaaagaaaccctcgacatcttcgccccgctcgccaaccgtttgggcgtgtggcagctcaaatggcagctcgaagatttgggcttccgccatcaaaagcccgaaaaataccgcgaaatcgcgctgcttttggacgaaaaacgcaccgaacgcctcgaatacatcgaaaacttcctcaacatcctgcgcggtgaactcaagaaatacaatgtccatttcgaagtcgccggccgcccgaaacacatctactccatttacaaaaaaatggtgaagaaaaaactcagcttcgacggcctctttgacatccgcgccgtgcgaattctggttgataccgtccccgagtgttacaccacgctgggtatcgtccacagcctctggcagcccattcccggcgagttcgacgactacatcgccaatcccaaaggcaacggctataaaagtttgcacaccgtcatcgtcggcccggaagacaaaggcgtggaagtacaaatccgcaccttcgatatgcaccaattcaacgaattcggtgtcgccgcccactggcgttacaaagagggcggcaagggcgattccgcctacgaacagaaaatcgcctggttgcgccaactcttggactggcgcgaaaacatggcggaaagcggcaaggaagacctcgccgccgccttcaaaaccgagcttttcaacgacacgatttatgttttgaccccgcacggcaaagtcctctccctgcccacgggcgcgacccccatcgacttcgcctacgccctgcacagcagcatcggcgaccgttgccgcggtgcgaaagtcgaagggcagattgtgccgctgtccaccccgctcgaaaacggacagcgcgtcgaaatcattaccgccaaagaagggcatccttccgtcaactggctttacgaaggctgggtcaaatccaacaaggcaatcggcaaaatccgcgcctacatccgccagcaaaacgccgacaccgtgcgcgaagaaggccgcgtccaactcgacaaacagcttgccaaactcacgcccaaacccaacctgcaagagcttgccgaaaatctcggctacaaaaagccagaagacctctacaccgccgtcggacaaggcgaaatttccaaccgcgccatccaaaaagcctgcggcacgctgaacgaaccgccgcccgtacccgtcagcgaaaccaccatcgtcaaacagtccaaaatcaaaaaaggcggcaaaaacggcgtgctcatcgacggcgaagacggtctgatgaccacgcttgccaaatgctgcaaacccgcgccgcccgacgatattatcggcttcgttacccgcgagcgcggcatttcagtgcaccgcaaaacctgcccgtctttccaacacctcgccgaacacgcgcccgaaaaagtgctggacgcaagctgggcggcattgcaggaaggacaagtattcgccgtcgatatcgaaatccgcgcccaagaccgctccgggcttttgcgcgacgtatccgacgcgctcgcccgccacaaactcaacgttaccgccgtgcaaacccagtcccgcgacttggaagccagcatgaggttcacgctcgaagtcaaacaagtcaacgacctcccgcgcgtcctcgccagcctcggcgacgtcaaaggcgtattgagcgttacccggctttaaatacaaaaatgccgtctgaaagccgaataacgcttcagacggcattttgattgccggggtttgctattttttgttgcatagtcaattaaaaacaaaatagtacaatactcaactttgaaggtctaaccatggcatactctgcggacttaagaaacaaagctttaaactatagtggattaacaaaaatcaggacaaggcgacgaagccgcagacagtacaaatagtacggcaaggcgaggcaacaccgtactggtttaaatttaatccactatattacgaacaatgcaaaaacatcagccaaaccgcagcaacgtttaacttgtcaagaaacacactttacctgtggattcgccttaaaaaacaaacaggcagcctaaaacatcaagttaccggtctaaatgccgtcaaatcggataggcaaaaaccggctcaatatgttgggcaacaccaggatgcctatctgcatgaaatcgccaaacattttgattgtacggcagccaccgtttgctatgcactcaaacagatggggataacgcgcaaaaaaagaccaccacttacaaagaacaagacccggccaaagtaacgcattatttgacacagccggccgaattttctgactaccaacgcgtttatttggatgaaacaggatttgaccgccacctgttccgtccctatgcccgcagcctgaaagggcaaatagtgaaagcgcagataagtggaaaaagataccgacgcttatctctggtgtccgcacaagtcggcaaccggctgattgctccgatggtttatcaaaatacgatgaccggagtcttttttgaagcgtggtttcagcaatgcctactgcccgcattgactcaaaaatcggtgattattttagataatgcacgatttcaccgtatgggtgtcttacgggaaatggcggaaaaattgggacataaggtattgcctcttgcaccttattcacctgagctcaacccgattgagaaggtttgggcgaatattaagcggtatctgcgaaccgtattgtctgattacgcccgatttaacgatgcactactgtcctattttgattttaattgaatatacatttgaattaattcgcacttaatttaaatgtgtttttaactgtgctttatttaaaggcaatgagaatgtgaaaatatcggatcaatcccaaagcagcctgcactttcgaaacggggtgcaggctgctttgggaatttcataaccgtttcagcctgctttattccgcaaataccgtttccaaccctaacccgctctctttcaccaagcgcaaataagccagcatgaatttataccgtgcttgagccagtttctgttctgcttgggcgacttcctgccgcgcccgtattacttccagccggttgcggatgccgtattgttggccggtttcggtcgatttcagtttcaaacggctgctttccaaaacccgttcttgcgccatgatttggtaacgcgccgcaccgctttcggtataagcctggcgtacggcgagtttgatgtgccgctcggttgcggtcagctgtgcttcggcggccccgtattgcgcttcggcttcatggattttgcccgacaattctccgccggtataaagcggcaaattcaactgtacgccgacgctcatccctttgccccgatagtggtagtcattattctgcgcagatgaagtgtagaggttattctgatagccgacatgggcagaaacggtgggatagcggctgttctgtgctgcccgaagcgcctgtccgctgctttgcagggcaagctgctgcatccggtattcatgattgttggataaggcaatgcgctgccattcatccagactgtaacgttccagcttgggcagatagcgtgccaacaggttggcggtatctatggcctcgatttgtttgctatccaggtcggtgtagtcgttcaactggttttcataggtttgtttctcagccaatacggcgatttcttgggccagggcattgtcgtaaccggctttggcttcgtgaatatccagcgcggtggcagcacctttattgaataaagcctgcgcctgccttacctgctgggcataagcctctttttccgccgcatgggcggcaacggtgtctcggctgagtaaaacgttgaaataactttcggcaactttcaacagcaattcttcgcgtgccgcatcgaaacgctgttctgcagcctgcgtatcgaacctgctttggcggtattgtgcaaatttggcagcgtcaaataaggtttgtcccacctgcacgctccatccctgtgtttcgcgggtggaagaaatcgatggcggctggcgctggtagctggcattggcggatacatggggaaggaatgcggccttggcttgttgttgccgtgcgcgcactgcatcacgctggtaatgggacgcttgaaaatcagccgaatgttgctgcgccgcccgccatgcttcaggcagcgtaaaagccgaaacggatggggaaagggatagtggcaaggtaaaaagtgaaacgggtaggatatatttggaaaaataggatttcatagccgaaaatagttcatgttgcaaatagggcgtcagtgtcaggcaaacggaaataccgtaatcttgcattatcattagattgagcaatgtcatccgggcaatggtttcaggcagtctgcatgtccgaaccggcggataacaaatgcccagtacggatccgcctatcgctccctaaagctttcgtccaatttggtttgcagcgggcttaacagataatccagcacccgccgtttacccgttttaatctccgccgtgacattcatgcccgccgtcagattcactgctttgccgtcaatattcaaggtatgtttgtccagcgacaccaccgccgtataaaccaagcccaactgttcgtggcttaccgcatcatggctgacacttttcaccttgcccgtcagataaccgtagcgcgtatagggaaagctctcaatcttcaccaccgcatcctgtccctgttccacaaaaccgatgtctttgttcaataccaaaacttccacgtccattttgtcgtcatcgggcgcaatcaccatcattttttgggcagcctgcaccacaccgcccaccgtataggtagccaattcctgcaccgtgccgtccgcaggcgactgtattgtcatcagctgctgccgctgctttgccttatccgtttggccgcggtattggtcaatctgttcgtttgcctggcgcagcgcatccagcgtatcgcgtttcaggttctgcgtattcagcacccgattctgctccgcctgtgcaatggccgcctgaatctgcctcatctgaccgcgcgtactttccaaatcgttccaattgctgaccgatttgctctgctgctccaaaaacgcatgttccgaaataaaattgtcggcccgcaaacggcggtagtctgctgttttctgctgctcgatcgcccccaccgaaaccagcttctgctcctgcgccttggccgactgcaattccgcctgatggccgcgcaaagccgactgcaattgcgcatcctgcgccgcccatgcctgatactggtgctgcgccaacacctgcgccgattgcacatcggcatcggagagacctaaagaccgtgcttgcgccatatcgatatgcggcacggtacggctttccaatgccgccaataccgcttcataacgcagtttggacaattgggcagcctgcaaagcctgctccgactgcaccacatcgctgtctgttcccacagcctccagttccgccagcgtttctccctgtttcacatgctgcccgtcgcgcacatgtaccgccttaaccaccgccgtttccagcggctggatggttttgctgcgcccgcccgacaccgttttgcccgaagccgccgccacaatatcgattttgccgaaccaggaccacaacaaagccaaaagcgcaaacgccataataaaacgcgccgcccatttcggagcggcagagaccggcgtatcggtcagttccaaatgcgcgggcaaaaacgcctgttcttccgccgtgcgtttgggcggtttcaactggtcgcgcaccgcccaaacattgcgccatacagtaatgtatcgagaaagaaaggatttcagggcggagaaaaacataacgggtataaccttggcaatatagaaacaggaaacaatataaatatgtaaaggaattttaacggaaagcgcggcagctgttaagggaaaggcgggaatattgacaaaaaatacccaagtcgttacaaatattcattattttactgcgtaacgcaacgctgaagcgcaggctgcttttgagatgcggcaaggttcggcaaaaagcagcctgcacatttaaccacaggaacaacccatgtttaccacaaacgatttacgccatttcctagaaggtttggccatcctattctcaatcggctattggggcaccatgctgctgttgctttggtttctcgtccgctttgcctataaaaagcccaaacggaaccccggcaaaatcctttcaggcagcctgaccgccgccgctatcctgatgctgtttgtttggattattcccaaacaattcggcccgatcaaagaagaaatacaggcacaagaagagtgggacagaaaatacaaagaagccgaagccgtgtttaacgaacaatgcaaaacggcgggggaaagatttaccagacggcggacaatgtggaagggattatgctgttgaaggtagtacctgagcgtaccgtttcggcagatgcaaaaaccagagacccgatgtgggacaatgcggctttacagaccagcgaaggcgtaaattttattgctcgtttcctaggattttttagcgatggggaataccgctatgtggatgtcctgcaacccaaccattccgatattattcggtattcaggtaaagatttttccgctaaatcaaatatttaatcatatacaccccgcccgttatgcggtaacgttcgaaaacaatgtcgattccaagctgcgcaggcactgggtggcaggtgcgaccatacggattatcgaccgccaaactgacgaagtgattgccaagaaaaccatctatgtctttgaaaaaggcttggacggcacgggtggggcgagaatgccgtggaagtttgctatcttgtgcaataaagaaagacttacttcttcagagccgttatcggattttgttcttagcgttttaaaaccttatatattgcgtcccttatatattgcgtccctaagaagggacgattaacaaaaattaacgtcctttactttctacaagtaacagggcttttttttgcccgtttttgaggattcgcaccatggaagataagcaagggatgacaaaggcggttgccggcgtgatgacggacgcgctagcggacggcaggaagccgacaaccgcttcaaatcttccccccttatctaacagggggggacagaaaccgaaacggcaggcagggttcaggaagtcttcgaatgttacgaaacgtacataacggacggtaaaggaaacctgttaggcgttcctcttcggcgcggtgtatcagattcggctttcattgatcaaattagcttttcatttcatgaaaaaacctttttcgataaatacggcgttcgtgtaagtcttttggaagacgaagattttattcgcgccgcgtccatgctcgccgaagaagttttcggtttcggtatctacaaagaatccaaaggttcgggcggtcgtttctatgagcgctgttggttgatgggttcggaagacgccctatacggtcgcgtccattttggcggccaacaaaataccattcttttcgaactgaccggcaccggttgcggcgtcgcaaaagaaggctgggaatcacgacttttcgcattcctgactaatgcaatccgcccaaaaatcacacgcgttgacatcgcaaaagactttttcaacggcgaatacagcccgaaccaagcccgtgaagaccgaaataaaggtatgtttacctgtcatcacgtcaaaccaaaaggcgaatgtttggggtcagattgggaagaagacgatgaagccaaaatgaccaaaggcaagacctatggtatcggctcccgtgaatcgtccaaatatgtccgcgtctatgaaaaaggcaagcagttgggcgataaaacaagcacatggacgcgatttgaaattgaattcaaagcaaaagacatcgttatccctttcgaagttttgcagaatccgggcgaatatttcggcggcgcatatccgatttgcgaacgattcgcccaaaaggcaacgcgcatacacgcggttaaggaagataaggtcatttcagccgaccgctaccttgaatgggtaaaaaaacagttcggacgtgcggcaaacggtctgaaattcatttttcccgaattggacaaagccaaactgtttgaactgattgagccgagtcatcacaagctgcccaagtctttggctcccgaagcctacgactgcgcctttttgaaagctcaagccattcatgaacagcccgcattcaaaccgtacaaagacccttactatatgtacgaatattacgagaatcttgaaaaacagcttgaacagcaaaaacacgtcaacaatgaagaaagctataacaacttcatttacgacaaattcgcaagactaccgatttcatgggcttaaagtgtctgcccgaaagacgtttaatcacacaaggaaaccaaaaaatgaacatccaacttcaaggccacatcgtcggcgttaaaaaaatcaacggacaaatcgaaggcaagagcttcgactattgctgcctgattgtcgccacacccttagacagctcccaaggcaacgcattgggcagctctactactgaatacgatttcggcggctctgccaatttcgagcagttccgaaacgcccaatttccgatcgaagcaaacctgaacgtagaaatcgtcactacgggcaaaacccaaaaactgaaagtcatcggttttcaactcgtgaagaaaggctgattgaatgcagaaagtctatgttgtccagtccgtatcaacaggggactttctgtatctctctcctgaaacgggcgacatcggacataccaaattaatcaccaatgccgattatttctacgacttcgaagaagcgattaacgcaggtttggaagaaatcggcaaccaatacgaatttgtcgtattcggatttttgaaagactgattttcggatgttcggcggtcgtctgaaaaacgctccatccattaccgccaaacactttttgaaggaaaatatcatgaaatttattaacacctgccgtaaatacggcgcaaaactggctgttgtaacagctgctcccctggctttggccgcacatgcaaatgcaacgttgcccgatacggcaaaaaacgctttggaagccgcaaaagcggacggtatggaagccggttggattgtagtgggcattttcgccgcgctttttgtattttccatcgttaagagagtgatgaagtaagacggcatgtactaccaagtcggaaataaatgtcttgagaagcaccaggctgaaaacctttatttcagcttggtagtaccaagaatcaaagaaaacggacagattgtcaggccggaatataacggcagcctgtggaagatgtcggacggtcagccgctaaggcttttattggcggaatgcagtccgaaagacaacctgcaaagcggtcttgaaacaggctggatagtattcggcatcctcgcgtccgtttactttgtttccctgctgaaaaaggttttgaaatgatggatttttatttttatctcggcgtttccgtacccgtattaatcggggcggttctgtttaagaattgagcgcatgaagttatggtgtcaaaatcaggcttttaattagacatttgaggcttgaaaccatgaataaaaatgaacgtgactttttctatatatcaaattctgatttagataaattgtcagaatcttatcctgataggcctctttcttatgtgttttattgttatttgaaagaaactggtctattgaaaaatttctcaatggataaatgtcataatttttttaatagaattaattttaatgaatcttgctttgaaattaaattcaaggatgattcatttttcattattggcaatggaaaaattgatgtttcggattctaataatttcttttctgtttcttttgagtgctaaatctttttcagcagatttagaaattaaaaatgggaaattgatgtatgcactttcggaaaaatataacgataatggatttaaggcatacaaagttttaggtgagggaggaggaattcatacagaatataattacaaatttgataaaagtttgaatttgaatgtattagaaagttcaacaggcgcacgctctcttgaaaaagtccccgttaaagtaactgcatcagtttcccgcgccgccgtcttgtcaggagtcggcaaacttgcccgcttaggcgcgaaattaagcacaagggcagttccttatgtcggaacagcccttttagcccatgacgtatacgaaactttcaaagaagacatacaggcacaaggctaccaatacgaccccgaaaccgacaaatttgtaaaaggctacgaatatagtaattgcctttggtacgaagacaaaagacgtattaatagaacctatggctgctacggcgttgacagttcgattatgcgccttatgtccgatgacagcagattccccgaagtcaaagaattgatggaaagccaaatgtataggctggcacgtccgttttggaattggcataaagaagaactgaataaattaagttctttggattggaataattttgttttaaatcgttgcacatttaattggaatggcggagattgtttggtcaataaaggtgatgatttcagaaatggggctgatttttcccttattcgcaattcaaaatacaaagaagaaatggatgccaaaaagctggaagagattttatcgttgaaagtcgatgccaatcccgacaaatacataaaggcaaccggttatcccggttattccgaaaaagtagaagtcgcacccggaacaaaagtgaatatgggtcccgtcacggacaggaacgggaatcccgttcaggttgtcgcaacattcggcagggattcgcaaggcaacaccacggtggatgttcaagtaatcccgcgtcccgacttgacccccggaagcgcggaagcaccgaacgcacagccgctgcccgaagtatcgcccgccgaaaaccccgcaaacaacccgaaccccaatgagaaccccggcacgagccccaatcccgaacccgaccccgatttgaatcccgatgcaaatcccgatacggacggacagcccggcacaagacccgattcccccgccgttccggaccgcccaaacggtaggcatcgcaaagaaaggaaagaaggcgaagacggcgggcttttgtgcgattattttccggaaatcctagcctgtcaggagatgggcaaaccttcagacggcatgtttcacgatataagcataccgcaggttatagacgataaaacatggtcttcacataactttttaccgtctaacggcgtatgtccgcagccgaaaacctttcatgttttcggtaggcaatatcaggcaagctatgagccgttatgcgtgtttgccgaaaaaatccgttttgccgtactgctcgcctttatcattatgtcggcttttgtcgttttcggttcgttgaaggggaaataaatgccattacttgccggtctgattccacttttaggcatacttctgaaaatgctgattgtcagaataatccttgcaacaggtctgacatttgtaacctatgccgggtatctcatcgcgctggaaaagttcaaagactacacgtcaaatgcgatcaattccatgccttccgacatactgaaccttcttttaatttcgggattcggtcaggggttgggctacctgttcggcgcattctcgttcttcattggtatgcacgcattcaaaaaactgacgtttgtctttccaggatgaggtagaagcatgatttatctgtttacaggaaacatggggacaggcaaaacctcccgcgtcgtctctatgattttgaacaacgaagacggattgttcaaaatgaaattggaagacggcacagaggtagacagaccgctttatttctgccatatcgacggattggataaacggcagtttaaagcccacgaactgacggaagagcaaatcatgtccgccccgcttcgtgatgtcataccggaaggcgcagtgctgattgttgacgaagcgcactacacttatccggtacgcgcggcaggccgtcccgttccgccttatattcaggaactgacagaactccgccatcacgggcataccgttattttgatgacgcagcacccgagccaacttgatatattcgtccgcaaccttgtttcaaagcatgtacaccttgaacgcaaggcaatcggaatgaaacagtattattggtataaatgcgtaacctcgttggacaatcccgcaggcgtaagcggcgtagaagtcgcaagttggaaaccgccgaaagaagcctttaaatactataaatcagcaagccagcaccaaaagttcaagaaaaaagtaccttgggcggtttgggcgttgattgcgattgtagggtttgtaggctggaaaagttacggcatttttaaagtttacagcaaagccacagacagccggattgagcaggaagcgcaaaaagaaagcgttgtgcagacgatgacggagcagcctgcatcatcagaggaaatgcctttaaaaaattcagacaatttgaaacctgaagactttgtgccgactttacccgaaaagcccgaaagcaagcctatttataacacagtccgacaagtaaaaacctttgagcaaatcgccggatgtatagacggcggaaaatcagattgcacatgctattcaaatcaaggaacacccttgaaagaaataacaaagataatgtgtaaagaatatgtgaaaaacgggttgcctttcaatccttataaggacgaacagcaaaggacggaacaggtggaacagtccgcgaaagcggacaagccgcaagttctcgtaatgggcggaaagccgtagcaaaatctcatgtacgacaactgaagagcgcggaaaaccgtttgaaggaattggcggcggagtcgtaaagcagaaagttcaatccctacccctcaggatggcttgagctgagtgaagggggttaattgctagaatggctgttttttttaaagtgtctcagtctggaatcgcttcgttcgggggttgtaggtgcaggaaaatagggcagaaaaaaggaaaagggggaagctttgtaaagattgggcgcgctttttacccaatctttatgaatacccccttttccttttttatgaactgtttttcaataccggaaacccccgaacggagtgattccagactgagatacgcccaaaaaaaatcagacattcgggtcgcaacagaaacctttaccaaaacctgcgaccccaataaaatcagatacggcaaaggcgataagcttcaagccctgaatgagtaaatcagcccattgagggcttggcgtttgacgaaacaccaagtaaagcccacgacttcgaaagtacggccaaagcgtacagcttgtaagaaagatagaagcgtgggctttcgtacatcttaagtttgaacactatctagggcaaaaagcccgaattaataaggttaaaccatgtacttaggaatagacgtttcaaagctcacaatagattgctgtttgattgtagacggtcaaaattatcaaaagaagtttcagaacaacaaaggaggatttgaacaattaataaattggctacaaagtcataaagtaaacgataagctccattgcgtgtgcgaagcaacaggcacatattacgaagcattagccgaatatctttattcaagatatacaattaccgtagagaatccacgaaagataaaaggatatgcgatagcagaactacaacgatcaaaaacagatacacaagacgcaaagttgatagcccaatattgccaagaccgaaagcacaaattaaaagcatggaaaccgccgacaaaagaacagaagcaattacaggaaatcgcccgatatttagactatctgaaacagcaacgcgcaacagaaaaagctaaacaacacgaagcacccgactatatcaaatcccatattcaaacaactatttcaaacctgacagcacaaatacagatagtcaaaaagcaattactccagttctacaaagacaatccaagttataacaatctacgcaaaaggctgaaaacaataacaggcataggcgagcaagcgacagcagtattgctatcaacctataaaagacatgaatttaaaaatgcaagacagttcacggcttatctaggcctagaccctagaaaatttcaatcaggaacaagcgtgaacggaaaaagcagaatatcaaaaataggaagttcggaaataaggaaaagcctttatatgcctgcacttgttgcatatcgttgtaatgccttccctgaatttgtagggcgtctgaaaaataaagggaagcatataaaattgatattaattgccatcatgcggaaactggcggtaatagcgtttacgattttgcaaaacggccaagatttccaagtggaaagatataaataaaaaattaaactgggctttcgccggtgattttcaatttattgaaaataaagtataaattaaaacatcaaatccattcaaaacgaaacaaacatcccgaaaaagtcggggtgcgcattcttgcaacttcaagaaatgtaaagttatttgaccgtgaaatacactatctttttttcaacaagccaccacagcaatcagacaaaagcaacccaccgccacacccatgtcggcagtacggccggacaaaccaccatccgaagcggcggggataccaccctcaaaggtgctcagcttatcggcataggcatacaggcagacccccaactacaaccctgacgactattggtggaaccgatattaactgacccccaaaagttggacagtttaatcaagcggctttcagggactgaattctgtactgaacagggctcagtccttttaatttcaacttgattctatcgttgttgtagtaacggatatattcgtgcagtacagcttccaattcggtaacggaatcatatttgcacgtatggaaacattccgatttcaacgttccgaagaaactttccattgccgcattgtccaagcagtttcccttgcgggacatactctgaaccagaccgttgtctttcaactgcttttgataaatatcatggatatgccgtttcaaatcggcatatttgtcttctgccgattggacaaccaattggtaatagaaggtgccgcgtggcagtccgacaatcaccaacagcagttcaacggatggcattgccttaaccctgcgacgagttgcgttctttctaccgcacttctttcccatagattaaggcatcgagcttttttagggcagccatttccgctttaaggcaagccaattccgcaagcagttcttccttggttttcagatagtcggctttttcgtttccggcggatgctgttttttcacgggctttcttcctttgggtttagggtttgggctttaaaccgttaataccattcaaatggtagaggcgcaaccattgcagcaagatggagcagtcgggcaaattcagttggtctgcggcagctttttgggacattccctaccccgccaccaggcggattgcctcaagtttgtattcgaccgaatattttgtcgtatgctttctacgtttgatgccactctctccgtgtaatctgtattttgtcacccatctgcgtaccaatgaatcggaaatagaaagatggtctgctgttccctgccaaatagtattgaacgacggcaagtcggaattcatctgaatattttgccataaaaaactgcaccccctaaagtcggtaaggtgtccaacttttgggatgcagttcagaagcggtctttttttgcctgccggttttgaatcatcctccgtgtatattcccttgacgaaaaaaatgatgatattacggataccaaaactaaggtcgtatccgcccccctactctccctaagcaaagagatgaaacagcgtatcggctccctgccggttgaattttccgaaaaaacgcgacgtaaccagcatcaacatatataagaacagcacaaatagcatcaatacatcaggcaacgaaaatgcagaataatgcacttaatggtgtttggatatctgttgttttgtgctgttagtaattcttctttctgtgtttacagtttagcagttgtacagttttacagtaatgtttaaacaatgactgatttattttaaatgcagatattgtagaggataaaaatggccaaagtcctttcagtaacatttttgattttttagcgagccttctcatttccccggcgagatcggcaatggcagcggtactttggccgccgatatgcttaagttcagtaaccttacgccaccaaaacccttgctagctaagggttaaacagctcacttgaaatctacttaagtctaatctaaactatccaatatggatagatttttaaacatagggcaagcagcaaaattattgtagctgaaagcacaatcactcgctggtggtctcaaacacgtgccgactacctcgccgaaaacactatcagccgcgataaaccgtgggaaaagctcgttatcagccgccgcacttggtactatcgcgggaaaccgatgctgtctgaaacgcaacaggagaaaaataatgagccgttacctgattacctttgatatggataccaactgcctgaaagacaattaccacggaaataactataccaatgcctactccgatattaaaaccatcttggctagacatggatttgagaacattcagggcagtgtttatctaggccgtgaaggcatcagtgaagcacacggaacaatagccattcaggaactgaccgctcggtttgattggttttactcctgtatttcaaacattaagttttaccgccttgaaagtgatttgaacgcacaatttatcgctgatggtgtgtatcaagccaaacaggctttccttcaacgtgttgaacaacttcgtatatccctaacagaagctggattgtctgatgagcaaatcaatcaggttctggaaaaacagaaatttgaattggaaagtcctaacctgaaattaaattaacctcctttactcaccaacatccgccgcagctctgtcagtttttggcgcgctgcggcgatttctgtgcgttttagagcttcgggtagggtgtgaaacaactcactcgaaatttacttaagtctaatctaaactatccaagcagtaattagtacaaaaaaggcaaacttattttaggagtttaaaattgcagctgcgataaaccgtgggagagtctcggcatttcccgcgccacttggtacaaacgtggcaaaccgatgccgtctgaaaccgtacaacaggagacaaaataatgcttgctcaaatcgaactcacaccctgccagctaatggtttacgtaacttaaggttactggatttacgcactaaggttactgaacttaagcatatcggcggccaaagtaccgctgccattgccgatctcgctggggaaatgagaaggctcgctaaaaaatcaaaaatgttactgaaaggactttggccatttttatcctctacaatatctgcatttaaaataaatcagtcattgtttaaacattactataaaactgtacaactgctaaactgtaaacacagaaagaagaattactaacagcacaaaacaacagatatccaaacaccattaagtgcattattctgcattttcgttgcctgatgtattgatgctatttgtgctgttcttatatatgttgatgctggttacgtcgcgttttttcggaaaattcaaccggcagggagtcgatacgctgtttcatctctttgcttagggagagtaggggggggcggatacgaccttagttttggtatccgtaatatcatcatttttttcgtcaagggagtatatcgactctagaagataggtattagatactgccttttcttacaagagtgatggtaggatggttctcttcaagtcaatcaaacaggaaagtatttcttttctgtctgaagatttgaaaaaggactggatgtttcacaaggttaaaactggggaaaaagatggatatggttcagatgaaatgctgagcgtaccccgtgtctatttggaaatgatgtcgcggaaaacgggagtcccctactccagtattctttaaattctaagcagaagacttcttcgtcggtctttttttgttgtttggtttgcatggagtaaaactgtacaactgttgaagcataaaaccagcaagaaggtaaaaaagaaagaagcagttctttggattttagatattaccgcaattagtttcctttcctaaaatttgtttaaattatttgcaatattaatataaacgagatattaatgatgagaaatcaaaaaggcataatgaatatattttgtacaaaatatttgcagtatttaaaaatgttggttcgtatatgaaaagttaaaaatgccaaaatgtacagttgctaaactgtaaaactgctaaagcaacaaaacataaaaaggaatgcaaggatgcgatcactacatctttttattccgaagcgtttatgattttacggtcaactgctactctatgtgcctagcttttcagctccctattttcgaatattggaggaggcattttcatcagtgtcgtaatgccgaccaaaactctcacaaaccatattggttcttgtggcagcaacacctatccgtttgttcaagcgaccacaagagtaacatgattggctggtagcattggctttaatctcttcgatatgaactccatttttagctgcaccttctttcagcatatgcagcagtagggatgaggcaactatcttctggtggagtttgttgactttaatctgtatgcactgtaggttgagcagattcaattttttgatacagattatccggctttgttcggcaattctgtttgcgaacgtatagtagagctgtcgtcttgcagctttcaatttgcggtaggtattttaccattcaatgcgtagccgctcggtacgtttgagccaaatgttatcttcgccatttgtaccaatttgtttttacattaggctgtgttttagtaatctattgatttcaattatttgcaagggaaaagacaattattttccggttaggaataaacctatcctgttgaataccttaaagccaaatacgcctatcaacaccatattaaaacacagccttttttaatatagtagacacaatctttccctatttatgaaggtgatcgtttctttcagattcgtattttaatgctttctatttctataaaaattgactagaatagctcaattataaaaaattgcgcgattttggtatttatcatgaaaatttccagacctccggaatttaccctgttgcaacaggaatatatgcagcatctcactgaaagaatgacgcaaattgccaagctgctgaattcttccgcaaacaatcctgatatagacattcccgattttcttactgaaatcaaagattattcagaattttccgtgacagatgaaaatggaacctacctgcattgggacaaattccgccggattcacacggaagatacgcggatgaaatggcgcgccgttaaggaaagccgcaaaaaaatccaaaaaccaattgatttcccgtttgaacatcagttttggttctgcattcccgactctttgcaggcacggcttcatttgattgacaaaagctgcggcagttctatcggcacgtctagcttgggtggcttcggcagaagcgagcaaaacagattcttgctcaagtctctgattatggaagaagcgattacatccgcccaactggaaggtgcggctaccacgcgtaaagtggccaaggatatgctcaaatcgcagcgtaaacccaaaacaaaagacgaaatcatgatagtgaacaactatcacttgatgaaaaaagcggtagaattgaaaaatacgccgttaagtgttgaaatgattttggatttgcaccgcattgctaccagtaacgctattgaaaacaaggccgagcccggacaattcaggcaggatgacgaaatctttatcgccgatatcaatggtaacagcctgtatcaaccaccgccgcacggacaggttcatacgctgatggaagaggtgtgtgcgtttgccaataatacctatgacggcgtggaaaatccgtttatccatccggttgtccaagctattatcttgcatttcctcatcggctacatccacccatttggtgatggcaacgggcggacagcgcgggctttgttctattggtttatgctcaaaaacggctactggctatttgaatacatatccatcagccgtcttctgaaaaacgctcctgcccaatacgccaaatcctatttgtatgcggaaactgacgatttagatttaacctatttcatctattaccaatgcgatattatcaagcgggcggttgccgatttggagcactacatttccgacaaacaaaaacaccaacaggaattcaaagcagcgattgcccaatatactgaaaagataggaaagttgaaccaacggcaaattggtatcctgcaaaaagcagtggaagaaagcggaaaaatctttactgcacaagaaattgccaaccaatacggcatctccctgaatactgcccgtagcgatttgagtaaactgggagaatatagattcctagtgccgttcaaatcaggaaatgctttagagtatgttgctcctcaggatttattggaaaggttagaaaaaaaatagtttgctagcccagaatgcagctttaaccgagtcaaaatcaatacagtccgcaccttcaaaaagaagctgcggactgcttgctttttgctctacaaatgatctttgtagctgatttaaccaagattgtagcaattttgctttccaagcaagcagggttagaaaattcgatacttttaattattggctgtgttttaatatgatgttgataggcgtgtttggctttaaggtattcaacaggataggtttattcctaaccggaaaataattgtcttttcccttgcaagtaattgaaatcaacagattactaaaacacagccttacattattggggtgactatcctgtaaaatatgtcctaaaacgtggaaaccacttttgctctgctaaattttaaggaatctttatgttacatataccccccaacggaacctgttcgatatgttagcagtattgtagccttaaacgtgcatagtcctaacggtacaggcgactggcatagtgcaaaggcattgagtgatcgggcttaccctgaaaaattttatatttacggtgaaaatcaagagcgaaataccaatcatttatttggtgataatggcattattgatgggacggatcgactgaacaaaatgggttatttccctgaaaacatcccagtttggctcgcagatcacccccgtgcttgcgtggattatctttacacagcagtgttacaaactggctcaatcggtcgggtgattttagatgattggtttccaagcgatgaagacaagcaatcagtttatgacttacttaaccaaatcgaaccgcacttgaatactcaagaatgggagaatttacagctatggaaacgcaaaaacccaataatgtaatgctaaccgaacgagataaaaggcacgagaagcggtattactgaatttcatccgcaatacgccatgtacaattaaatcagcagatgtgtctaaacgtaccgctgttcccgtttgaaagaatttttcatgatgaagtctatcctcaccgtatccggaaatcgtatgcgtaaacccagaatcacctatttggatgtttgggcaaacgatgaaagaatcggtactttggaaaagggggccatgtatcggttcgcatacgacaatcccaattcttcgttgctgggcctgcattatcaagacagaagcaaggtatatatcagcaacaatatgccgcatatctttgcacagtattttccggaaggctttttggatgcacacatcacaagcaaatatgcttttcatgatgcgccttttgaagacaatgagatgctgcgcttggcaattctgtgcagagagactttgggtcggatacatgtgcgctgtaatgacccgctttttaatgaatggattgacgggttggagatgaaaaatccaagaatattgactgaacgggatttgctgggcataaatgcccgacaggtttttcagcaatatatggcagaaatcttccatcacggccgtttcgtcagtgtatccgggatacagcagaagatgtccttagatgccatccgcagaaataccaagcaaactgcctcatatattgccaaaggttttgatgcatccgaatatccttgcttggctgccaatgaatttttatgcatgcagaccatcaaacaagccggcattgccgttgcacagaccagcctgtcggaagattcatcagtcttattggtacgtcggtttgatgtcagtgaacagggttattttttagggatggaagactttaccagtctgcgccagtattcggtagaagataaatataaaggcagttatgcggctattgcacagattatccgacagatatccggcagaccagatgaagatttaatccatttctttaatcagcttgctgccagttgcatattgaaaaacggcgatgcacacctcaaaaatttttcagtactctatcatgacgaatacgatgttcgtcttgcacctgtctatgatgtattggatacatcaatatacagggttggaacacaaggaatttttgatgcttatgacgatacgctggcattaaacctgactaaccacggtaagaaaacatatccttccaagaatacattgttggattttgctgagaaatattgcgatttgggaagagaagatgcatcctttatgatagatacaatcgttcaagctaaagaacaggttcttgttaaatactcggatgtattgcgtgagaatgaatggttggcgcagaagtggcattttatcccggatgaaaatgaagaaggtctaccgtttacattccggtagctgccgctgtcagagatggccggtctactttcaccctgaaaatcacttcatcttatggtgtttgaaaccgagaaattagaagaatcgtattcggtaggagatatactgggaagattggaaaactggtaaatcactctattgattgagttggcggcctatatgtttaatgtaggcaaacgagaaggaatcatgtatttcatgattccttcttaaattcctgtgtcaatctaatatcaaaacacagccatctcttaccataatcatgataggtgttttattatgaaaagctatatctatagttaccgttgatttgactatgccgttttaaaacgtatagcctacctgaaaaccgcttgcccatttccttgattggaaaaattcgggctttttcaatgcgcggccggtaaatatatcgtaatgcaggttgccgccaagctttatctgcccgcgtatcccaattgctgtgccgactagagtttggcccgataaccatttggcggattgtcctgaaacatgtcctacatcagccccaagataaagctgatggcctggtttaaattgccagctcaaatcgttgcgccaataccatccccgctcggcagacaaactcatttcaccgtcgaagccacgtacggtgtggtgtccgccgatagccagtttgtcttgcgatgttagcggggttttgttccattgtgcatgaacggatgtgtcataggcaaatagctgtttaccgatttgaaaaggagtatttacatcagccgatgccgtccaaattttcatacgtgacgtgccttcgccaaaggcttcttcaggcgcgcgcagagcatctttcatgccggtgccgcgtttatatttcaacttaaaatctgccgtactgcgaccgatatattctttgtgggaaagttctgccaaccaacccgcagttttacgccgttgtacagtcagttcggcatcatcaatgtaactttttgtttccctcatccacagttttacaccgagataggttttgcgtttggcatcacgatacaacaggcggttgaagccgaaatcagtattgtaactttttccattatagtcatagacttccgataatccggaaactgcctgatggtaacggtagccattgtgattgaatgcccatgtccatttaccgaaaggggctgaataatgtacggcgtaattgtttgatccgccttctttgcgatggccgtcaaaactttcctcatcgggcgtaccgccaatcgaacgtccataatttacatagaacatatcactcagtcccaaaggattgtcggcagagaaagtgatatttccttggtattttcctgtcgcctcactacccgaattatccatccccacactcacacggtagggcagcagacgttgccgccattgcaccacgacatcactttggtttggttctccctctacgggaacgatttggagatcggcttccgcagtcgggagacgtttgagattttccagtccttgttccaaatcacgcagattcaacagatcgttcgagcgggtgggaaatttgttctggaatgctgcaatacgtcctgcatgggtttgatcatcgttagaccgatcgattcgtatggagcgcagatagctcggtatcagggttaattgaagcttgccactattcaaatcctgtggcgcagccaagatacgggtcgtggtatatcccctgccgatcaaagcattttgtgctaaggacatgatttgattaatgttgcccgcatgcagacacttgccagcctgaaaacccgtttcgcgcaaggcacgttttagggcaaactgaaaccgagcatggtgttcgccttccaacaccacttcgttaatggcaaaacacggttggctgctgtcatcgcccatcaactgattaaccgtttcccccgtgtttttttgatgcaaacgcacatcgctttcaggctgcatggtttggcgcaactgctcttcgcgttggcgttgctgaatatcttgctgcatacggatttcggcagggttgggggaggccaacaaagtagcaggagcaatgatacctgccaataagcagcaccaagacaaaaagcgaatattaggcaaataggataaaggaagtttcatggcatggtcgcaaaatcaataaaatcatcaatgggcattcaatacacgattgcatcaagttttaaaagttaaaattctcaaacccttatcgctccctttatgatacaaggcgcgtactgtcgtactaggaaataactggcgcacagctgagcgcatttgatgactgtgtcccaatggcgcaaaccattgaatcagccaaatattgtcgccacagttccaatcgctgttgtcacgcaaatggcggtcagattctaaataatgcgcctgcgccacttcatcaaaataagcccatgagatataaccgattggttgggtacccttgcaaaacaaagcgaactgcccgttttttaacacaggcaatatatacgtcatcatctccacaataggtacttggcgatgcgtaggcgactgataccatagccaagtgatggcaccgagtgcttcgctttcgttccattgttcattggggtagagtttaggagagatgatgtttaagggtggagtgatgggcatattttaagttagggttcgtgttggttaaaacaaaaaatggtttcagcctgaaatgaaatatttcacgttaaaacatagttttagcacatgagactgaactgcgtgggcaacgagttgcccaccctaccatgtaacagttcgcattaattgcacaggctacgctggttattgcacaaacaaatgaccatactgcttatctttacgaatattgtatccaccgccatggtgaatacactgataagaaatatgttgcccaatttcactaaatgagacttcggtaatagatttatatcctaattgattgcctaattcatgcaaaacaaaggtgagattttcagtttcacatgtgtcaacggctttctcccagcgtggattaagtttggagcaattccagtctgcacaactaccccaaaaagggcaagctgttagcattgttgagcagaatgatattagcactaaattagaaagggttttcttcatatctctctcctttataagttattgtgtgttacaacataattaggatttttaatgcactgatagtaaatatccattactgttttgtttttgtacttttcttcatcattctcaaaatagatattcagttttactaatgccttatcaaggcaattcataatttcttggtgttccttatcagtagttgtccagttactactagtaccgtacaaggctgtaccgactacgacagtacctaataaggtagtagcgcaagctgttagacaaaaaacagatgaaagaaacagagaatatttagaaagcttctttttcatatttttcattatcttttgttttgtttggttctaccagtatgggtttagatttgttaattggcttaccttgagcgtcatattcaacttcaccccatatttttacatagtcatcaaattcttttgtacctgcttttggcacctccgcaaaataactgctatgcgaatagcacaaccccttacatgtaccttgtgtggtgtcattggttcctagcaagaaaggtatccatttgttccccacaaaatctttatcatgcacgattgagtaggatccgctgttataagttttgccgtctgcacccgtataggtatagccgtttttctgtaaaacatcggcgtaatcattctgcacatttgtggctgtaccatagaaacgtgcttttctgattggggcaatgccattttgtttttgattgtttacccaatcttttaaggaaacgcttgctgtaattcccccacgactgtgattactggtatcaaccgaccagccgttacccattttttgaacctctcgataaatatcttgattcagtttttctgaattggttttgggtaaatagccttggaacactttattatttaattggtcgtaaccgacatacatcagttcagaaacaagacttgaaccgagccataaaaaatcttttattttgttattagaatcagatttatatttccctgttggaggattcatgactgcaataacaccactaccgtttgtactattacgattttgttttgctgcgttgcttaatgaatcttctcgattattgaaaataccaggattagacacagtaataactttgccatttgtgtcttgaatgcttgccagttcttccttgcttaaatcattcaatgaccaaatttgtctggtatcaaaggatactttacctgttttttcatctattatcttcttatggaaccacatttctttaggtgcagttgcagaccttaccgctctatcggcttgggttgtggcaaacatactccaagccatatcagaactccctgctccccaaacgagtcctaatcctgaatcctaggcggtaatgacgaaggatagttttacaaaagtttcggcctacaatttataggtttataataataaaaatatccatcaaaaaaatgtgatttttctttttttaaaagttgcatcttgccattcttgtaatcacattcgtaatattcaacatttttcaaatctgaatcaaatagatattgaggtaaaacattcccttccttatctagttctattaattcctcaaaaactatcttacttttatgataaaaaacaattttttggaaatctgaattgattatatacagttttacataatcccaattaaaattcgttatatcactaattaagaattcttttttattataattaaaacttatttttcttattacattcttttcaaatataaagaaaataacaatagtgattaataaagaaaatatataaagtatatttttattcatcttttatcttctccattgtctggctgaaatttgtgctctgatttgttttctcctctgctgaattttaaatccggcaccagtattatctaagtgaatcaatatattgcttgtattctggtaatctttttcagataatctttttcttacaacatcataatttccattactgtttctttctgcttgataaaaaccattatttttataagtttccagaattaatccaactaactcttttgtgtttaacctattggtatttaatgctatttctcttcctatttcgttatttagttgatcaatcatttcatctgctttatctaatgaaagattacgtcttatagaataattaattttttccccactttcatgactatttcctactttaacagcaatatctttgccaaattctcgtgtgatggttgcttgccataaaacgtgcctgaatgcattgccaactccaccttcaccaccaaattcactattaggaaataaatttaattgaaaagttgaagcaattgttgaaatattaggctctaatgtagagccaggatctttatgtacagatccaattgcaatagcaattctagggtgcctaagagcaaatttcacttgctctacagtatcattattctccaccgcactttgcgcattcaggctgccttgcgctgcatctgttgcgctgttgccgactgccgcacccgtagccgtacccaatacatttgtaatcgctgttacagtctctttctcttccgccgttaagtcgcttcctttttctttgccgtataaccatttgctgatgtaaggcgcagccgcttccgacccgcccgcactcaatgctcctgctagagcattgttgtctcctactgcggcaaccgctgctcctaataccgcgtgggcaagaacgtgtgcggtttcttgactggcggttagtttaccattcgcgttttgaccggctaaatctttaaagtgctgtccaatcgcatacgatacggctggcgatgcggtagccgcagcgatgcccgctccgctttgggtcggcgcagctaaacctgaggctaacatgttgagaatgactttgccttgttgccaattatctgcttttgctgccgcatcttgagcttcatgggctttgcgtttggcagtttccatatcgccattggctaatgcctcggctgctgctgtttcggctgcttctttgtctgctttgagtttgtctaaatgttggttaatctcggtattggcttgttgaacatttttactaaaatcttggctgacggttctttgtaaatccagttcactttgcaccgcttctttgttgaaggtgttcttcaagctgcccgaatgtcgttcggcggtgtctgtggttacgtttgtatcaatatcggctttggtttgtgccgctgttttgcctgtcagccggatttgtgcggcttcgtcggtgatttgaatgttgcgggtgttgatgccgctttttgtgatgctgctttgactgtcgctgtcgctgccataacccactgatgaacttgcgctgtttttatcggctacgcttgtcaggtgtttgttttgaggtttattttgtgcgccctgtcccagtgttttgccgcttatggacgcacttgcgcccaatccaaaactttcgcctttgtattggctgtggtttttgatgtcgctatgggtgagggtggccgtctgaaagcggtttttacccttgtcttctgcgctttgggtactggtgatgatgccgcctttgaggtctgtatggtttccgaccttgatttgatagccgtcttctccggcataaataccgctttgctcggttactgaaacatggtcggctcggattttgctttggctgtaatcgccaccggcactgaagccataacctacggtaacttgtgcactggcgttttgttgtttgctttgataggtttctctatcttgtacgctttgaatacttaggtttttggcattgacttgtacgcctttgccgcgtacttgcgcgcctttgatggtagtgtcgccaccgctttggataagggtttggctgcctttgtcgccgatatggctatggcggtgggtgatgctgtcgccattgccgtagcctttgccgacattgccgcctgcggtaacgcctaatgaccagcctccttgtccgaatgatacggcagcacctgcgttccagcctgccgatttgttttggccgcgttcggtattgctttgctcggctgattggagtgtgatgtcgttatcggcaatcaggattgtgcctgctttgccggcaacatctgagcctgcgatgttgatattggattgttctgctgcgcctgtggcgattaatgtggttttaccacctgcttgaatttgactcgcttgggcttgattggcttgaacttgggtggtttgtcggttttgctgttcgccgtaggttatggagatgctgacttgtttggcattggttgtaccattggctaagttttgtgcactcttacctgtttgataggcttgccagcctgcattggcagccgccatggcattaacgcggtcgtttttgctttgtccgacttgtttgctgctttgtgctacggcaatcgcttgttgtgccaaatcggtaacgggcgaactgaatgccaccgttaggcctttttgttcataggtttgggtggtattactgtttaatttgttgtgtgccgcttgaatgtctatgctttgggcatagatggtattgttgccttccgggctggaaacggtactgccgatttgttcgtagtgtttgcctgcaacaatggtggtatcgcctttcaagctgcctacggtactgcctgtatgttcgttgctttgggattggttttcttgtgtgtttgtcttgctgccaatagtgaagccgatacctgcactcatcaatcctgatttctgggtttgatgataggtttcgctttggctttgagtttgggttgtaccaatgcgaacatgattgcctgcttgaatctgggtgccattatcggaaataacattgctgccaaggatgttggcatcgtttcctgcctgcaatacaacttgcttgccttcaaaggtgctgctttgggcggtttcgtgatgactttgggctttatcggtaatgactaatttattgccaccaccgcttctgcctgtgtgtttggacgcatcatcaacatgggtcgtgttgatgcctgcgctgatgttgatgtcatttttggcagacacagcgagtgtaccgtttgcgctgctgacttcggcagctttggcattgaggttattccctgacaatagggtaacatcgccttttgtttgaatgctgctgccgacttcgttcgttgaaccgcgaataacatggttatcggcatcaaaatgggttgcttgatgtttgctggtttgtaccgtatctaggttaatgtcgcgccctgcttgcagccgggtttgcccttgctctgattgattgctgatttgaccggcaatgatgttgatgtcttttcctgcctgcgctgctaaaacacctttttctttgcctgtgatataaatacctgccattcggtctaggtaggtgctgctgccttgtgtattttgactgctggcggtggtgctttggctgttgatgttgttgcctgcgttgagcaataatgtctgttcggcagaaagcatgccgccaatattattgatgtcttgtgtggccgtaaccgctgatttttgcgcatgaatacgcccaccgatattgtctagcgtatcggtattgataataagcgcattgcgccctgcaatcgtgcctgagtttttcaggctgcctgaaacattgatttgtgtattgctgcctgacaacaatgcacctttaccgtctatgtcgccatttttaacgcgtacataaacctgtggcaccaatacggtttgtgtgccgccatcaggaagcttaacttctttttgtaccaaccaaacaatatcgctggtcagttgcgctacttgctcggcacttaatgcaatgccaacgctgagattcatcgaacgtgccgcagtcgcgccattatccattaaggctttaaattgttcttcgtcgttttgataaccgtctaaacgacgatgccctgtcagctctgcgatttgttcattgattaaacgttgctcgtaataaccatcacccaaacgtttatgtaaattgtttgggtctagtttgaggctgtccagcatatagtcactacccaaccattgacggtagttggcaaagcgtggatcggtttcaacaagatagcctttattgacaggattgataatgtataagctgctgctgggtaatggggtaaaagaattggacgtatagggtagcgaaataccgttgctttgcggcaactcagtgccttggctgggcgcatgatggcttaatgctttgcgatgcgattcataggcaaatgaacccagtgaaatgttgcgtgtgatttcctccggcaaagtgtaattttgttcgctatgtcccgttgagtctcgtcctttatgtttctcacgccaatagctgtgtaatttgccattttcactgaatactttcttttcgccaaaggtttgctcgttatgcaaaccgtctttttctgtttgtacaatgagattgccaccagcaatgatttggctatcggtattaaatacttctttaccatcaatggttaaatcattacctgaaatgattttggctggcgcagtttgggtaacttgggttttttgggtgactttttcataatcgtatttatgccaattttcatgcgccgctccatcaggggtgcgtaagtggtctgattcatcgttatagacagaccagcctaattcatgttgcgtgccttctcgcaataattcgtgtcgtccaaatgcttcgtaatcaacaatatgctcgcgccctgtttctaccaactgcgttttcaaatgctcattggtattgtgcagcttttctacacctaaacgcattttgcctgcagcttcaatggttgcgccggcattgtgtatcctttgggctttgcctgtggcttggccattggtatctaatgcgccgccaaccgccatatcgttaccgctgtaaatcagactgttttcacggttgtttaattgtccgatgcctaaattcaggttttcacgtgccgcaatggcggcacctgtaccgttttcatcttgattgtctaagcgggtagccgcaatagcgatattgtcgccataaatccgacctgtaccgatattattcatttgcccggcttggattttggtttgttgtccgtcaatcaagcctctattggttaaattgtgctgcgtgccaatgtctgtcgtaccgccggattgaatgttgccttgtgctgcattatcaaggttatttgctttaatccgaatgcgttttcctgcttgcaaagtatgtgaatttttcaggctgcctcgtgtactgagcgacaattcattgcccgccacgatattgcgttctacataaaaatcatcttgtaacgcaatatccagtttattatcagcggcaagtgtgccgttgttggataacgattttgcctgaatagcaacatcacggcctgattgtatcgtgccattcgtattatcaatgacagcggtagattgctgaccatcgtgaataatcagttgttgattggtcgctatttcgccattttgattgttcaggctgcctgaaacggctaaatccgctatttctgctgataataacttgccatgagcgttatccagttgatcggtttcaatctctaactgttggcgtgttgtgatgttgccattttgattattcaggctgccggcttgaatgtggaccgcatcactgataattgttccattgtgattgtcaaacgccgaaccttttgcatttaactgatgaatgtctatttgtcctgcattatttaaaccttgttgcgcactaacatctgtttgaccattggcaataatactgcctgaattatccagtgcaccatgagtgcgaattgtcccatcagcaaaggtaggcgcagttatgtttgatatagaaacggttgcagtacccgtacctgttgccgttgttggtgtggtagtggatgaatggaaagatgcattgtaactattgccggtttgattgcttgaaccatttgacgcggttggtgcggtatcttgtaaacccatgcggccacggttatccattttgccttgtgcatcaatatggagtttttgtgaacctgtttgagagagtttgccttgattattaagtgtgtcggtatcaatagccaaacgagcggcttcaatggtgcctgatgtttcatttttcaggctgcccgaattgtgaatcaatatttcgcctgaggacaataatgtgccagtgttttgaatcgactgactgtgaatttgagtgccttgttgcgataccgccgtaccgctgttttcaacgccctgactgcggatattgactttgtgttccgctgtattatccgtatctttcgcattggcggcagccatcgtgccactattgactaaacggccatttgcatcaatcgccacattaccggaagaagcaaacaactgcccttgattacgaatgcctgcttgctcggccgtactgatcaaggtgattttgttggcatacatacctcctaatttgcctgtatcaatcgcaaataaagggatatgtgtgccgttgttggctgtattgtttgacgtattggcagcagcattattgagaataggcgaatgtgcattacctgttgcgaccacatcgttttgtcccgcgacgacacgaacatcttgtccccatacgggtgcatcaattttggaatgataactgagaatacgtgtgaaatcggtatcacgggcatccaaaccgtgtccggcgattacaacattgccttgccttatcttaaagccgctaaggtctcctgcttgatattgcggttggcctgtcgtcaaagtggcacgggaagcattgataaaaccaccaccattgactgcaatccctgccggattggcaataacgacttctgcacgtcgtccgcccacttcaatatagccattcatttgtgaagaatggctgctgttgatttggtttacaaccacacgtgcttcgccccttgccaaccaaggattaccttgaatccaaccgcctagctgtgtttgggtgttgctgcggctgttgtttaaaatcgccccgcgattacccacatcaaactgggcgtattgattaacagaaacccctgccgaagtaggggtttgaatattgacttgcggtatgccgttacctgtttgcagaatcgtggcttgttgagttttaggagcagctttatcagcaataatgccatcagcaaaagcaatattggccgtacctacagccaaacataaagaaaagcccaataaagaaaaagaaaagatatttgaacgacaaacaggtgcatgagtagtaccaaaaggaacagatttcacatgagcgctgcctgaatcactatcggcacagcttttaccttcgcgcttggtagtttcagcaacggctaccacagccccacgtttgcggttgaaaattacacgatagagagttttattcatgatttcagttatttgatttttatagagttattagaaaaaattggatagtctgaccattctagatcaaggattttggcgagtcaattaccgccattttactgccatttgtttattaaattagggactttactagataacggttaaaaatcccattcgaacgaaatggcaaggtttataccgtcgttgtccctaatgcgcaatcagcaacattattgccgattatccgagagaaagttaagtctgatggcattgtgtatacggatacctttcgtagttatgatgtacttgatgtcagtgaatttagccatttacgcaagttttccagtatttgactggcaatttaaaacagtcggattttgtcccatttgttggccaagtctttacttgcttggccgtttgaatttaaaaagcagtctttctactttccgacctttttttctgttgtaaggtctataatccaatagcattcccaaagagcattttggacggtggcggattcgcatttgaagtgcaactttccctaacagaaaaaggccagtatgcggtagcatacggcctttcctgcaagaaagattgccatgagctacacgcaactgacccaaggcgaacgataccacatccaatacctgtcccgccactgcaccgtcaccgaaatcgccaaacagctgaaccgccacaaaagcaccatcagccgcgaaatcagacggcaccgcacccaagggcagcaatacagcgccgaaaaagcccagcggcaaagccggactatcaaacagcgtaagcgacaaccctataagctcgattcgcagctgattcagcacatcgacacccttatccgccgcaaactcagtcccgaacaagtatgcgcctacctgtgcaaacaccaccggatcacgctccaccacagcaccatttaccgctaccttcgccaagacaaaagcaacggcagcacgttgtggcaacatctcagaatatgcagcaaaccctaccgcaaacgctacggcagcacatggaccagaggcaaagtacccaaccgtgtcggcatagaaaaccgacccgctatcgtcgaccagaaatcccgtatcggcgattgggaagccgacaccattgtcggcaaaggacagaaaagcgcattattgaccttggtcgaacgcgttacccgctacaccatcatctgcaaattggatagcctcaaagccgaagacactgcccgggcagctgttagggcattaaaggcacataaagacagggtgcacaccattaccatggataacggcaaagagttctaccaacacaccaaaataaccaaagcattgaaagcggagacttatttttgtcgcccttaccattcttgggagaaagggctgaatgagaacaccaacggactcatccggcaatacttccccaaacaaaccgatttccgtaacatcagtgatcgggagatacgcagggttcaagatgagttgaaccaccgaccaagaaaaacacttggctacgaaacgccaagtgttttattcttgaatctgttccaaccactaatacactagtgttgcacttgaaatccgaatctaaggtcatctgaaattaaatttagttttcagacaatctttttcttcaattggaacgtggagttacattttcacctaaactatgcacgctagatttatagataaaccattcagacagtccaataaacattatggttgggattaccaaataccaaaaactaccgactctttcagatgaattaaataaagaaaagtacccatatgtataaaaaacaatgaaggttaatatgacagatacagcaagttgattttgaaatacccatctgaataaagttgataatatcactggaattagaaaccataacataactataaacccaccccctaccatcccaaatataaaatctattacccctaaaaaagatagtttaaaatcattaccccataaacctgaaaaaattaaaaggccaaaaaatactccacctattaagaaaatagatttaatattttgaataagataaaataaataatttttattcatggcttgcatccctgtttctcagaatatcccataagcttacaaccatatttaattctagatttgtaatctaacatattaattccatcctctatttttttcctctcatctaaaggatttggaattattgaaaatatcttatttgatgttacccctttaatcaatgacaaataatccttctcattactcaaatatttttggtgaataggctgtaataacttttgctcgcttttcaactgttgaatatcccactccctaggattagtttttttattgaacaagtctctaaaattataaaatccatttactatcagtgcattgcctgacgcagccctccattcataaattggaggattaccaacaactttacctgccgcaaaagttatataagaagcttctccgtctgcccctaacccagttatagcagcacgcgatacaaaatcagctccaccaaaccatcgtgcttttgaacccaaattttgctcataaagattgctggcagcaaagaaatctgcacgattgtcaatggtgttgaaatacttgtcaaatcttgtagatgccccttgtgagttatataaatagccaaaaacttctttggcaacccgtgatacatccgtaggcatatacttccacgcagcaggcatggcaatatatttaatagacatattaatgccgtttctgcaaccatcgcccaatgggttcctagaacagactttttgaatttccgtatcaattactttgctaaattgttcatcctttttgatggcatttactttttccatcgtagtagaacaagttttaccggaaaggcattttgtcaatttatccattctttccttgctaagcgcattactctctaccgccacagcagccgcattcgccgcagcattcacatcccccttactcaacgccgcaaccgtccctgctgccagcttcgccttagcaatgatttttgcccggtctttcacattcaggctgcccgggtctctgccgtccagcagggcttcgccgaggatttcaccgaccgccgctcctatcgcgccatcctgacacttgcccttattcgccgccgcagccgcacagcccgctatggcatgggcaatcttgtgggtaatgtagtgctgatccaactgtttgattttactggctgcttctccatgcgcagtattcaccaaagccgcaaggatattcgcttccagattgtctttcaggctgccgccgttgacagcggtattaatcagtgcggcactgcccgcattggccaggttgacggtcaggttgttgatccactgcttatcgctgacattgttcagtgccgaagcaccgattttgtcggctacgcctgcggtagcgacggcaaccatcagatttttcaccgtgctgcttctgcccagctctttcagggtgttaccgatattgcctttgttgttgatgagcgatacggaagcctggctggccagcgaggcgaatgcggcatcggttgccgctgcggccgcgccgtttaagcccagtgcggctccggctcccgcgcccgcagtaaccacggtaacagccagcgcaataatcgctgctccggctccggttaagccttcctgtttatagtcccatttgtcgtacgccagttgtacctggttccagttgacgtctttggtgacttggagctgtttcaaatagcaagcgtagggggtgtcttcagcacgcacgcatctgggcagtatatagggaatctgaatatttacttgcataacaaatgccgtctgaaaaattgtgagcttttcagacggcattgagccgtaaatcatggaacgcgtgcgtgctgaagcacacaccttacgcatggattttaggtttcatgcaggctacagcttgctgctattcatcaaattgcggccattgaaagtctgttgttttactttcacctctcaacagtctaatcatatcgcttttgagaaactcaaaaaaatttttaatattaccaacatagagcatagcttcacatagtgaactacatgcagatttaatgtcttcattgtcaatagcatattgatattccttcatatgctgaaaaaaagaatcaaagtcttcttctaattcatcattccaatcagatgaatagttagaaagccattgtaagtcaagaggatcttcactattcaatttttcagttgtggctttctcataaagatcaaatccttgtttaattcctaactctcttaaactttcttttactacattaaaatttttcatctgaatcaccttatttaagattcaattttcgcccttgccctgctaatgtcttagcttaattttgagcgagttttaggtttcatgcagactacagcttactcagcacacacgagtctaaacagtatacagggaatctaaatatttactttcataacaaatgccgtctgaaaaaattgagcttttcagacggcatatggccgtaaatcatggaacgcgtatactgaagcccacaccttatgcatgggttttagatttcatgcaggctacaacttgctttctattcatcaagagatggccatgaaaaactattctttttatactcagcactcaataatgttgatatatcagtttttattgaatcaaatataagagatagattacctgcgtaaatcatagccataaataaagaattactggcaattttgaaatttttatcgtttagggctaattggcatacttccatataatctaaaaagttttttaaatcctccttaaattcattatcccaattcccgtctgaagtataatctttaatccatttcatattagctgtttcatgattaacttcttctgatacttttggatctgtcaaatcaaacccttgataaagccccacattaatcaagattttttttatatcattcaatgtttccataaaatttcctattttaagtttaatttacgaccttttgctgccccagttttcatttggttaagcgaaccatccatatttagaacaaacttaaagttcccatttttatcaaaaacctctaaatgatttttatgttggccatctaaataaaacctatcaccggtttttaataacccttggtttctttttaccaagaagacagactgcccttgctgcgtcggaagcgttgtcttttctgaaatttgagccagctgttttccaaaaggattatttttcatgtatgtactcatattcggtacagcacctttattagggatataaggacgatttttttctaaaacttccttgaccttttgtgccgcttcccctttattagcgcgattcagctctgttccgacgacaatatcaataacggctttggcatcgttccaatccaatgtttcgtcgaataaggtggtcaggttgtcggctaaattataaccttcgtctttcaacgtctgttttaaatctctaacgttgattttcccgttttttaatccttttctggctaccttataaaccacttttgcagcagttacaacagctttaaccgcattattttctaccgcgttttgtgcggtttgtgcagcagtattgacatctcctcccgttacgcctgcaactgtacctgccgcaagtttggcataggcggtaattttcttaacttccagatctaattgttccggggtcatatcgctaaaatcggtatttttaaccaaagcctccccgacaatctcacccacagccgcaccgatcgcgccgtcctgacatttgcccttattcgccgctgcagccgcacagcccgctacggcatgagcgattttgtgggcgacatagtgctgatccagtcctttgatcttactcgccgcctccccatgcgcggtattcaccaatgccgccaggatatttgcctccagattgtctttcaggctgccgccgttaacagcggtgttgatcagcgcggcactgcccgcattggccaggttaacgttgaggttgtttacccaaggggtttcgctccaagtggcaagggaagaggcaccgagtttgttggatacgcctgccgttgccgccgctacaaccagattttttaccgtgcggcttctgcccagttccttcagggttttgccgacatcgcctttattgttgatgagcgatacggaagcctgagaagcgagtgaggcaaaggcggcatcggccgctgctgcggctgcgccgtttaagcctagtgcggctccgactcccgcgcccgcagtaaccacggtaacagccagcgcgataatcgctgcaccggctctggttaagccttcctgcttatagtcccatttatcgtaagccagttgcacctggttccagttgacgtttttcgctacttggagctgtttcagataggcatactcgggctgtttggccagcttttcgatttcggttttcagattgcctttggggatgtcgacaatgtagccgccgggagcagagagtacgggcgcaacggagcctgtgaaacttggcagttgcaaggtttcgatattgctgccgcgtccggcctgtttctgccagagggcagatttgctactgcttactgtttcagtgcgcacactacttttgatgccttcaagaataatcttggcatctgctcgtgcctgatcgcctacacctgcacggatggctgcgccgcccagcgtggtttcaaactgggtgccttgcagtttggcgtcccagcctgattgcaggttggccgattctgcaactacccttgagggcagggcggttttcatggtgtgggtggtggtgtcgtgcaccttgtcgtaggtaatgccgataaatttgcgcttggtacgggtgtcaagtttgtcgtagttgagatcttccacggcatagagaaccagcccacgtccggcttcgattttaacggagccgcggggtgcatcaaacaaggtggcgtgggcaccgatattgccgccggatttgatttcaataccttgtgacgcactgaggctcaccgggtcggctttggcgtttttatgctctttgatttcagtaacatgttttagtttgtaccacttaccggttttatagctgcgtttatcgaaggtgtagagctcaccctgtccggcgtagtagaactggtcgccgtaggattgcagtttgattttgccgttttccgaactgatatccgtggtgctcagcaggatgcggctgttttcattggcatacggcgcgctaatgctcacaccggttttacccgaaagttctgcagcaagcgtaggaggtgtcttcagcacgcacgcgtctgaacagtatacagagaatctgaatatttacttgcataacaaatgccgtctgaaaaattgtgagcttttcagacggcattgagccgtaaatcatggaacgcgtgcgcgctgaagcacacaccttacgcatggattttaggtttcatgcaggctacagcttgcttccataaatcatttttatcagagctcgtaggtacggttagccgcctttagcggcgtaaccgtacgaatgaaatgccaagttgcaaggccgtctgaaaaagttgaaaaacagatttcagacggccttgttattttataaagtttgctgatatgcgtacggttacgccgctaaaggcggctaaccatacctacgcttgctcataaatatcaatattcggcaaatcggccaaatctattggacacgcaatatcccaccaaagccattctaagtaataccaagggtcttcaggccatattgcttgggcatcttccaaagtaggccatatgtctttcaatttctgcacttgttcttttgaagttccagttagaggaattccgataccgtcggtataatcatgtaaacggattgaaccgtcatttaacagttcttccataaaagaacagaaattgttttttaagttttcatcttgaatattaatacccatttgatttttataagagttaaaaattgaggataaatcgatttgaaaatcaagaatcttaattttttgtttctcatccacggtaaaatcctttgtaaattattggaatttaagctccaatttagtacctttaataaatgatggaggattctgcaaatctaatgtccatcgtgcttgagttgaattctctgtttttgaaaaatttcttaatgcaatttttgttcctgcccattctccagtactgataatgccatttgctaatcttccgtcaggcaaaactctaaaattcggattctggccagtcatctgccgataaagcgcaaaaatctcctgttcgcttacgccgctgtaaacgggtgctccctttaagcttatggcttgtacaggtttgatggtttttccgttaatggttatcggaatattacttgcatcaagcaagcctgctcctttccttactctattgttaaatcccgtcttccatgcatccagttgcgtatcgcgttgggcaatacggaataaaatctgctgttctgctttggctaaatttgccaaattgtttattgtttctttaggagcagcttgcttagccgccttcgctttcgacaacgcccccacaggcgcttcccaagcgttgcctaccgttaccgcacccgtggcgattcccgcgcccgcttcggcagcctgagtgaccatgacagtacaaccagaaggattagccatgcaggtgctgatagctaatttacccgctgtaccgatcagcggagctgtccaacctgcagcataaaccccatagctggtaatcacaatcgggcctgtgatgccattacggatattgcttatccaaatggcagcatccttatcctgcggattagtcatcgcacctgctgcatgtgcaggcataataccttggataattttttccagtgcggttttgtcgggcttctgcggttgatgctttttcgcattggtaggggtactgtcaaaattcaaagcattattcactaccgccacctcagccgcattcgccgcagtattcacatcgccgccgttgagtgccgccacgctgccggcaataatcttcgagtaactgataaccttatgcttttccgcatcgctgagtgtagcagggtttctgccgccaagcatggagtcggctacgatttccccaactgctgcgccaattgccccgtctttacattttccttgtaccaatccgctaacacacccagccaaagcgtgggcgaactgtttggcaacataatcgtcgctgaaggttgttttgattttgctggcggcttctccttggaagctattaaccaatgctcctaatgcggcattgcctaagttgtctttcaggctgccgccgttgacggcggtattgataccagctgagatacctgcattactgagattggtagccagtctgcctccaaggttggcaatagtttgattgcccgtactgctgaacagttcggttcttaccttgctgttcaattgggcaatatctgcgcccatctgatttaatgcacccgccgtcagggcagaagtgacaatctgcttgaccgtatcactggtgccgagatctttcaacgctttgccgacatcacctttattattgatgatggatacagctgcttggctatacaaggaggctaaagcagcggtttgcatggcagtcgctgtagaaacggtagtagctgctgctgtcgttgtggcggctgttccggcagctgcggctgtactacttcctgaagcggctacaccgcccgctgcggttgcgccgtatccataagtcagtgcggttacgattatggtaacaatcgctgcaccggctctggttaagccttcctgcttatagtcccatttatcgtaagccagttgcacctggttccagttgacgtttttcgctacttggagctgtttcagataggcatactcgggctgtttggccagcttttcgatttcggttttcaaattgcctttcggaatgtcgacgatatagccaccgggggcggtcagtttgggcggagtagggctttcgaagctgggcagtttcagcgtttcgatagtgctgccgcgtccggcctgtttctgccatacggttgagttggtttctaatttttcttccgactggatacggttcacaatgcctttgaggataattttcgcatcggcacgggctttttcgcctacacctgcctgaatgtccgcaccggccagcgtggttttgaattcggtaccttcgagcacggtatcccagcctgaacgggtggctgcagtttgggcgacgacgcggacaggcaatttggtttcgttcagttcgtttttactgtaattgctcttgcctaccttgatgccgataaagcggcggcttttttggacatccaactcgtgcttgtggatgccttcttctgccagcagttgcagctcttcacccgcaaccagggtaactttacctgcaggggcattgaagcgggtggtattagcttcgatgttgccgcctgcctgaagcgttatgccgttggcggtcagctcgacgggggctggcataatcaggtggtcgcgggtgctggtaaacttggtttttctgatgattttgccgcttttacctttggtttttaagaaggtataggcatcgttttgtccagcctccagtacaatatcactatgggctttgatgtctatgctgcctgagggagctttgatttcggatgcaccgataataatacgtgcatcatcgagtgccgcagctgcatgaatacttacccctgtacgtccggtcaaacgtgaaggcttgttcagagcagctttgtcgtagtgactcttgtaggtgggcttgccaatttcatattggtcggttatgccgtcaatcagaatagcagccgcctctgaatctgctgcctttggcaatacgcctgcggcgtgaaggttcagttttttggaagcggtaatatcggaaccgctgatttcgatgccttgtgcggaaatcaagtcaatattttgtgcagaaagcttggcttgcaggtattctttgcctttgggttttttacctttaacttccttgttgatggcttgaatatagaaagcgagacggtcgcgttcttcttgcagggttggaatcagcttgcttttaggcgagctttttttcaactgcgcaatctgctgttccaattctttggatttttggttgagttcagccgctttttgtgtaggaaaataattgctgaatgagttgtttacggcttcgatattcaacttgcctttggtggtggcgacaaccaagtttttaccggctgtaattttagaacctcttaaatctgtttctcctgtaaccagacggatattgccttttgcttccaatgaggaaacttgagcactaggcgcacctgcatttcctccttttgcagacaacagcaattttccgcctgttttgatgctcaggtcggtatgcgcactgatgcggttggcaggttcgatggttaatgtgccgctacctgcttcaatattcagccgtccggccaatggttttaattcggcattatcttccaaagttttggtcgaaacggtactccaattgatgttgccgcgcttgactagggcggtaccggcagtaaggttgattgcacccgctctcagcgtggtgttgtcggcaatttgggaatagcgcgcattgagtgccaatacaccgttagccaccagcttgttggcagaaggcagtttgtcgttttgccaaatctggctgccggtaatgcttagatgacggtgtgcgtaggcatctacttggttgagcgttacccgctcgtgttgtgcattaagatgcgtattatgggtagactccagcttggtattttctatgctcaatgcccggtcggaatgaatgttcaatgccccgcttttggcatggacgttaaggttttttaagtcggcattaccaccgttgtttttgatgctgatgtgttttccgttgattgaattgcgttgttttccgtcaccaagctgaataccgttgccggcaaccaacgtaatatctcctgaagatgaagtgatattggtattgtctgctttcagacggcctttaccaaccgatcctgcattgacatcggccttggctgtcagggtattgtgaccggtaaagtcggcattaccgttggccaataaggatacatgaccgtctgcagaaacagcatgaaggccgtctgaaacgatattgccctgcaatgcggtggtttcgagagccttggctgcgttcagcttggtattgcgaagctgaatattgcctttggctgcctgaatgtgcagattacccgagttggtacgcagattggtattggtaacattcagcgagcctgcctccacacccatgtcttttgaggcagtgagggttttactggtgccggtaatatgggcagcgttatccgatttcaaatggatgctggcggcagacaaatctttatcaacattcaaattcagatctttacctgtatgaacatacagattgccgggagtattcagattggtagttttggcagtaatgttatcgtctgccagtaaagcaagctgcttgccgcccttgatactgcctccgtttaagcggatatcggaggtaactgttgaagcttccaaagaaagcggtttgcctgcttcgatgtgtgcggtgtctttggcatctattacggcggaactgctgatggtgccgttggataatacggtaacatctgccccggtaatgcgtgtgttattgcctaattcggcgttgcctttgctggaactgtatacggtagtgccagtctgaatactggcctccttgatgacggtacggccgtcggccgacagagtagccgggcctttggcattgttcacattagttttgctctcaatcaccaaattatgaccagcatttaataccgtggtagctgggcgactgccgttattctgcaccacggctccgttacgcaagctgatatcttctcccgtctcaataaccaataagcctttgctctcgatccgaccaccattggagataaatgtgcctgccgctcctttttcggtggtttcgatggagagataagtcggtgaagcttcggtgccgtcggcagtggtggcgatgcggccgctgttttcaatgcggcctgacgaagtcacaatcaattgcttggccgcttcgagtgtgccggcatttttgacgcctacgcctttttcattggcaatcagtgtgatgctgtcggcgtacataccgcccagtgcggcagtatcaagggcaatagtcggtttcgtacccgctgccgtacctgcactgatttcgccgctggcgtaatctactttctgaggaccggtagaaaccgccaggtttttaccctgtaatttcccctgcaaagcaactgcacgagcaagtaccccggtgtagtcggctccgcctttatcattccaacctgctgctcctacggtcaatgtgccttgacgcacatcaaatcctgtcagtgcaccgtctttgccgatttggggcgcaccggtagttaagatgccccgaccgacatttttaaagccgccgccattaacggtaatgccgttggggttggcaataatcacgtcggccttttgaccgcctacggtaacgatgccgttgagtttgctagccgtaccgcgtacctcgttcaaaatcaattgcgcactgcctttgaccacaaacggattattgttacggtcgttgtttaacactgcccctttgttgtcaacatcaaactgcgtatagcggttgtggctcaatccgcgtccattcggagtttggatattcaccaagggggcaccagtgttggttttaaggataacgacctgctggtttttaggtgctgatttgtcggtggtaatttgggcatgggcaggcaataccatactcagggaaaccaaagagcagaccaaagttttaagggtggttttgagtttgccgcaaaggtcgcctgaagttttcagtgaaacagaaaccgaactgcctgcctgtttacctttgccctggctgttggcagtttcggctactgcaaccatggtgctgtgctttttactaaagataatgcgatgtaaacctttattcatgtctattccattttgaagatgaacgtactgcgcgccaagtacgtaggtaaagtttgacggtctgaggataaggaaagaccgtctaaatatcagtaaaaaattcagaggttagaaactgtaattcaagttgaagccgtaaacggtgttggtcgtctgaaagcctttgggtttatgaagcggcttgccggcaaacagatcataagcaaacataccgcctactttatgccctcctctgaagccgaccactgcacccatcagctgcttgcccgatacatattgtgcactttcgccagatacgcggccatagtccgcaccgagatagaactgatggttcggatgaaaataccaagttaaagtattctgccagtagaaacctcgctctccgaaaagactctgctccccatcaaatccgcgaacggtgtagcggctgccgattgacaatttatcttgggcaaccaacggcgttttgttccattgagcttgaatggcggttgcgtagaaaaactgctgtttgcctaaaataaatggggcggctgcgtccaaactggcagtaatgattttcatacgagatgtacctggaagaatatcgccgccgttttcttccggtgcaggcatactttggcgcatgccggtcccgcgtttgtaagacaacttgccgtcaagctgccaacggttgaggtaagcacggtggcgcaattcggcttcccagcctgcagagcggcggcgttgtacttcgatttcggcatcgtcgatgtatttataggtttggcgtgtccataatttcattccgactgaagttttatgaagtctgttacgccaaagcatgcgctcggcggccaggctgctctgatattgtttgccgttgtaatcgtaattgacggaatagccttcggttgcttcgtggtaacgatgtccattgtgattaaaagaaaacagccatttttttacgggcaccgaataatgcacgctgtaacttctggatccgctttcagtttccgtaccggtggcatcagtcaagtccgttttgtgcgccaaaccgcgtccatatgaaacataaaacaaatcgcttaagcccaaagggttatcgaacgataaagcgacatttccttgatatttgccggtcgttttgccgcccgcatcatctataccgatactgaaccgtatgggtttattctgctgccatttgatctgtaaatcgcttttgccttcttcttcggacggtataatctgaatatctgttttaacactcggcaaacgacgcaggttttccaagccctgctctacatcgcgaagattgagaattttgttcctatataagggaaatttgttattgaatgcactaatactgccctcggcagacttcccatcccgtttttcttcatagcggatatcccctatttcgcctgctgatacccgtaatttcagaattcccgaatccatattctgtggttggataatagcttgggaagtgaggtagccacgcacgatcagtatctgttgcgcggctttttgtagcctgctcaaattattggaacctaaacacatcccagttttaaaagctgtttctttcatgagcacagaaggaagaaaagaaaatttgcgcaccgtcttatcatctaaactaatgtaatttacccgagtacacggtgtttcatcttcactcaggacataattgttcttctccaatggttgctcgaaacggacatttgcatcagttaacaattcagcatctatgtgctgctgacgctgcatggaacggataagttctgcatcgttttcatcggcagctaaggttttaaggggtatgacagccaggataaccaacagacatggagcaggaaaaaatttcatgacatcaatattattttagcaatatttactattttgtcataaatttaaaagtatttacagttatagaatgagacctttgcaaaattccccaaaattcccaccaagacatttaggggattttggggaattttgcaaaggtctcggacagtattttgaacgcagtgcgcgtaaattcgtatggaaaccatgaaatcccgccacagccgccagacatgccaagccgcattctgatatttctgtttgcaggataacaggcagctttttctttaagcccaaagacaggttttgcagatggggcatagatttcctttttgaaaaatagggattaggaagttggatgtattttagaaaggccgcctgaaaaggtttcagacgaccttttgcgactagctgctattttatttaaagcttttctctaacaaacgagctaatatttttcctgtaataaaacagataaaaaacagcatccaatacgtcagattggaaaaatcggtcgtatagagaatcaacatataaagaagcagcatgatgccgagtgcgatgaattgataatgtttggcaaacatcatgacctcctcaactattaaggcaaaccgcctgaatattctcgttcaatcgtttcggcaatttccctataacgtcgataccatgaccagtcgaaattttcaatggcatggctcgcaaacgtaccaaattcaggcatccctatgcggctacctgctaaagctccgattgtagctccccaaccaggcggattactgaacgtattgtttggcaatcctaaagatttatcaggatttcccgtatcgttaagccctgcagattcgcaaatttcgcaataatatgagctttgttgcgcattacctgagcctccgacccaagtcatttcatgaacacatatagtggattaaatttaaatcaggacaaggcgacgaagccgcagacagtacaaatggtacggcaaggcgaggcaacgctgtactggtttaaatttaatccactataaaactctcattttgaaactccttgtatcgttaatcaaacaatcaaaagggcagatgccctatccttgcttttacaaacggagtgcctgtaaaaggggatggtttcaggcagttttgaagtttgtgtttttatatattgtcttctggtcgtctgaaaaggtttcagacaacttctttatctttacagcctcaagtcttacagtttgcccgacatactataaatcagctccaatacccattcgtacaatcaccgtttctcgtgtaggatgtctgcttccaacgtcatgccgatttgcagcggtttttcctcaccgtatgcagtgatggttgatttgtcgggttttattttcacaagataaacaggttcgttgctcttcgccaaatcggaggataccatgcccaatcccgacaattcctgtctgcccagtgccgtttttgctactgatacgacactgccggaagcaagcccgaatttttgatagggatatgcctgataacgtaggacaaccttgtctttcggcttgataaagcctgctgcactgctggggatatatagatgggcatatagctcggtacgttcgggaacaatgctcaagagcagtttggaaggatcaacctgctgtccgacttcgacgttcggtattgctatataacccgaccgtcctgcacggatgatttgttcagagcgcatttcaaaatccaaaacttcttgagaaatatcggcaatggtgcgttcaagccagctttgttctgtctcatgccgcttgggggaggctggccaatgtcagattctgcgtgcggatttcctgaagcagcccgacttcttctcggcggtaggcatcaagtttggctttctgctctaaaagctctgccttgacattcatcatttcttgttttggcactgcatcattggcggataggaaacgatatttctgcaacatttcttccgcaagtctaatgcgccttttctgaccgtctatctgttgcgaaatatggagttcctggttttccaaacgttcgacagttgctttaaggctgcgcgtttcattcccgtgtatcagcttcagacgacccagttcctgttctgccaacgttttcttcaaaactgcctccgttttcaactgctgctgcacgctacctcctgcgccgaaacgtgaggtcgaaagcgcaaatagcttgtcgccagccttaaccttttctccatcttccacgaatttcgctgtaattgtccccgtatccggtgcatacaccctgattacgcccgatgcaggtaaaatttgtccctccactgttgtctttcgcgtatagttaccaaatatcaaaaacaggataatcaataacgcagatatcgatgcaaatgtcgtccatagggaaaatgacaacggtcgtgtcagaatcactttacccgtcaggctggtttggcgggcaacggcgacttcgggacggaagaagggttgcttgggtctattcataaaattgaagttaagaaagtttcagacgacccctagagattgtctggacgatgagaaatatcagcagtaatctgtaccgtcagtgtagccgtttcctgatttatctgcttttgttgcgggagcagttaatccatgttcaatctcaaagattggtcttccgttataaggaggtgcattaacggcatcatttacccaattacgagtcacattgtatacaccatttgcaccagcagcaccgtaagcatttttcggcagataataaactgccgctgcggcagcaggtattgcaaccaaatccccccatgtgggacctcctttggttgtggcagcattagctacatttccagctatattgtctgttacaggacctccccctgaaaccagcttcaattcatgaagttgaagttcaatcatttttatactccttttcttggttggtattcctaaaaattcggctaacaaaaacatatggcagatatattgaaaaaaaattcaaagtaccctgaataaaattcaaattccaactatatttgttaatgtagtcgagaagaaacatatctgataaaaaatatagcacttgataacaagctattactaatattacgaaaaatgtaaattgcttccagtttttcatagaatccctcacaaaatttccagaaaatctaactctatcaactgataaatcaacttcctaacttcttcatattttccctgattgaagttaaccagtagatttttcaacaataacggttcattcttaccgatgtgttctaacacttttttccccaactcatctacgcttatcttcatcccattcccaatcaaatatcccttttccaacgtatccaaattattggcatttaatctcaacctgacgtcgtctgaaagcggagtagcgttgggattcgcgaactgttcgagatgaaaagcggtatcggtacgttctttgccgagaaagtcttcactgaaggcttcataattgacggggtcggcaatcatggcagcaatttgtgcggcagtatcgttgatacgcgtcctatcttgctcccagtctgagaaactgtggcgcagactttctatggtgggaaatttcttcattagccactcgaggtaattatagccgttgggtggaaaggtaccgacagcgaagtggaaggtttcacagccgagcgggataggtctgtgccaccaaccgcgtgggatgtagaggacatcacctgcttcaaggataatatccatatcgatatgttcaggaatggaaatatcagtatctttagtctgttgcatatacaatggcatagggaaatcaggggcagtaagttgccaacgtttcttgccgaaaagctggatggcatacacatcgcgggggtcccaatggtttttataagattcgtcgctgccaaaagcaagatatccactaacaatagtatgtgcgccggcaaagcgggcgacttgacgggcgatatggtctgaaaacggctcgttgttaatatggttatagactaacgacgcaccattcttcatatgttcgtagataacggatttaataaaacggtagcgagttttgcccaaatcgtcgaaactttcgacgtattcttctttaggaacgattgcgccttttttacgcagatgaaacagcggtgcggttgggtctgctcgttggtatatctcgttgatatctttccaagatgcggattcgagattccgaaccgctcctttaaagagcttgggcttttgatacagataagtctgtcggaacgttttaggactaatgccgaagtcgagatggatgctcattacttccccttactcagaaaatatttaaaatttataatgttacatatatttacaaatattaaagtttttttttgtgtgtgcgtcaaggaattgttgacaattttagttaaaaatttgtctccaaacggaaaaaagcggtttgttttttgttgttaacatttttattgtaattaaataaaaggtcgtctgaaaacggttttcagacgaccttttgctataatcgggcttcatcgccccgttcggtttggaaccttatgaaaaccctcgtcctcctcctgctttccttctccacgaccaccgctttcgccgcatacggtttgggtttggggcaggcaccgaaatatcctgccggctttcgcgcctacggttatgtttattccggacggcagggctaggttttaaaaacagaggcggatgccattaaattagacacgcttttcaaacgctttgtgtaccgtccttccgccgccaatcaaaaccccgtcggacagcgttcggacggcatacccgccaaccacacaaaggaaaaaccatgagtaaaaaaatcaaagtcggcattgtcggcgcgacgggctacaccggcgtggaactgctgcgcctgcttgccgcccatcccgatgtcgaagtcgccgccgtaaccagccgcagcgaagcgggaaccgcagttgccgattactttccgagtttgcgcggcgtgtacggcctcgccttccaaacgcccgacgaggcaggtttggaacaatgcgacatcgtcttcttcgccacgcccaacggcatcgccatgaaagacgcgccgcgcctgattgaacagggcgtgcgcgtcatcgacctttccgccgacttccgcatacgggacattccgacctgggaacactggtacggcatgacccacgccgcccccgacctcgtttcccaagccgtgtacggattgagcgaactcaaccgcgaagccgtcgcacaggcgcgcctcgtcgccaaccccggctgctacccgacctgcgtatccctaccgctcgtgccgctgttgcggcaatgccgtctgaagcccggtatgccgctgattgccgactgcaaatccggtgtgtccggcgcgggcaggaaaggcaatgtcggttcgctgttgtgcgaagccggcgacaacttcaaagcctacggcatagccggacaccgccacctgcccgaaatcaggcagaccatcgccgggcttcaggacggcatcgccgaaggattcgtgttcacgccgcacctcgcgccaatgatacgcggtatgcacgccaccgtttacctccacctttcagacggcagcgaccccgaaaccgtcctgcgcgactactaccgcgacagcccgttcgtggacatcctgccgaccggttccgcccccgaaacccgcagcgtgcgcggcgcaaacctctgccgcatcagcatccaacaggcggcgcaatccgatgtgtgggtcgtcctttccgtcatcgacaacctcgtcaaaggcgcggcgggtcaggcagtccaaaatatgaacattatgttcggactggaggaaacacacggcttggacgcaatccccctgctcccctgaagcgcaaacagcaaaccgcaggcatcgtgcctgcggtttttgatgccgtctgaaagcgacgtttttttgggttcggacggcttttgacccatccattcacacgaaaacaaaaatctaaaataccgtcattcccgcaaaagcgggaatctagtttatccagcttcagcaatttccgacacatttccacacgcttcgattccgtcatttctccggtttcagtcattgccgataacaccgtggtttttcatttctagattcccgcctgcgcgggaatgacggcggagggcttgccgtttttcccggtaaatacctgcaatttaaaatcccatcattgccgtgaaaacaaaccaaaaacctaaaatcccatcattgccgcgaaaacaaaccaaaaacctaaaatcccgtcattcccgcaaaagcgggaatctagtttatccggcttcagcgatttccgacacatttccgtacgcttcaatttcgtcatttctccggtttcagtcattgccgataacaccgtggtttttcatttctagattcccgcctgcgcgggaatgacggcggagggcttgccgtttttcccggtaaatacctgcaatttaaaatcccatcattgccgtgaaaacaaaccaaaaacctaaaatcccgtcattcccgcaaaagcgggaatctagtttatccggcttcagcgatttccgacacatttccgcacgcttcaatttcgtcatttctccggtttcagtcattgccgataacaccgtggttttttatttctagattcccgcctgcgcgggaatgacggcggagggcttgccgtttttcctggtaagtctctgcggcttctcattgccggtttccgcctacttgggaatgacgtgatttaaaatcatgaaaatgtgtcaaaaataatatagtggattaacaaaaaccagtacggcgttgcctcgccttgtcgtactatctgtactgtctgcggcttcgtcgccttgtcctgatttttgttaatccactataaaaatcagatttccgttacacttttttccaatatttcagacggcattttgctcacacgcccaaatacccttccctgccggaaagccaccttgccaaatgcgcttcgacgatttcggggttttgttcaatcagcatcggggcggtttcgcgcgcttgttccaagaggtgcaggtcttcttcgagcttggcgaaacgcagcataggcacgccgctttggcgcgcgccgagaaattcgccggggccgcggatgttgaggtcttggcgggcgatttcaaagccgtcggtgtgttcgtagatgactttcagccgcgctttggcgagttcgcccaagggttcggcaaacaggaggacgcacacgctttctgccgcgccgcgcccgacccgaccgcgtaattggtgcagctgcgccaagcccatgcgctcggcgtgttcgatgaccatcagggcggcattgggcacatctacgccgacttcgatgacggtggtggcgaccaagacgttcagcccccccgaagaaaaccgcgccatcacttcggccttttcggcggccttcatgcgcccgtgtaccagtccgatattgagttcgggcaatgccgtctgaagccgggcgagggtttcggcggcggtttgcagttgcagggtttcgctttcttcaatcaatgggcagacccaatacgcctgccgcccttttcggcaagtgccgaggacgaagccttcgacttcggcgcggcggacgttgttgacgaggcgcgttttaatcggtgtgcgcccgggcggcaattcgtcgatgacggacacgtccaaatcggcgaaaaaactcatcgcaagcgtgcgcgggatgggcgtggcggacatcatcagctgatggacttcgcgccctttgtttttgagggcgaggcgttgggcaacgccgaaacggtgctgttcgtccacaatggtcaagcccaaattgtgaaacgccacgccgtctgaaaacagggcgtgcgtgccgacggcgattttgacgctgccgtcggcgagtttggctttggcttcgtctttggcttttttacgcaaactgccaaaaaggcggacaacttcaatgcccaaaggttcgagccattgtttaaatttaataaaatgttgttcggcaaggatttcagtgggcgccattacagccacctgcgcaccggattcgatagccgtcaaagcagacaaagcagccacaatggttttgccgctgccgacatcgccctgcagcaggcggtgcatcgggtaggtttgcgccatatcgcggcagatttcggaaacaactttttcttgcgcatcggtcagggcaaacggcagggcttggcgcagggcttgggtcaatgtgccgtcgccgcccaatgccgccgccgtgccgccgatacgcttctgtcgcgccaagcgcatcgaaagctgttgcgccaaaagttcatcgaatttgagccgttgccatgcaggcagcgtgccgtctgaaagctgatgaatcgtgaaactcggcggcggcgaatgcaaaagacgcaggctttcggcgaggtgtggcagcttcagacggcacagcagggcatcgggcagcgtgtcgtgcagcggcgtaacgtccaacgccgtctgaataatacggcgcaaagtgggctggttcaaaccgtttacggtcgggtaaaccggcgtgaggctttccgccaaaccgccgccctcggcatcgcggattttgggatgaatcatctcgtcgccgtaaaagccgtgtttgatttcgcccacggcgcggatgcgtttgccgaccgccgtctgtttctgatggctggcgtaaaagtggatgaagcgcagaaaaaggacgctgccggagccgtcggcgatttggacaatcagctgcttgcgcggtttgaacgttacttcctgatggataacctccccctcgacctgacacggcacgccaatcggcgcgtccttaatcggcataatgtgcgtctcgtcctcgtaacgcagcggcaggtgcaacaccaaatcccacgcggtatggaggttgagtttgtcgagcttcttggcggaaacatcggtgattttgagctgttttcgggtttcgggcgacatcataggcagattcctttggacgcgcctattttatccgaaaacaaaaatgccgtctgaaacggattcagacggcatcgacaggcaggaatcaagccccggcggcttcggcttcctgctgttgttggtaaatcgcctcaaaattaatcggcgcgagcaggacgggcgggaagccggcgcgcgttaccgtaccggaaacggcttcgcgcgcgtaagggaagaggatgttcggacacgccacgccgagcagcaggtcggcatcttcttcggggatgttttccaaacggaaaataccgctttgggttacttcgttcaaaaacatcgtgcgctcgttatccaatttggcggttacggtaacggttacatccacgttgtagtagccgtcttccagcttttggctgccggtggaaacgcgcatctccacttcgggctcgccctgttccaaaaagatttgcggcgcgtgcggcacttccaaagacaagtctttgacatacagtcgctcgatgctgaatacgggttgcagttcttcgctcattttgttttcctagttgggggttaagggttcagcagtccgtccagcccgccttcctgctggaggcggtagaggtcggtaaatccgccgacgtgcgtttcgccgatgaaaatctgcggcacgctgcgctgtcccgaaagctgctgcatttcggcaaaggcttcggggcttgcatcgacacggatttcgtcgatatgtccgacacctgccgcgtgcagcagccttttcgccatcgcgcagtaggggcaaaacggacctgtgtacatggtaacggtctgcatattgggtttccgaaagttttgcaatgataatcaatataggggcatttcccctgtttggcaagtgcggaacagatgcacgttcaaacggcatgtgcggaatgtgtcaaagtttcttttttaaagtatgatagacattgtgaaaaatatttttgcacccgcgctgcgcggcggaacggatgcaaaatatttttattacattttcaggaaaaaccatgttgtcaggactccccatccccaaagacatcgcgcgcccgcccgaaacgatattggtcaacatcacgccgcagaaacgcgcgtagcggtgttggaggaaaacaatatctgcgagctgcacatcgagcgcaacagcgaacacagcctagtcggcaatatctatttgggcgtggtgcgccgcgtgctgcctgggatgcagagcgcgtttatcgacatcggcttggaacgcgcggcgtttttacacatcgtcgatgtcctcgaacaacgccgcaaccccgaagaaacccagcgcatcgaacatatgctgtttgaagggcagtctgttttggtgcaggtcatcaaagacccgatcaacaccaaaggcgcgcggctttccacccaaatctcgctggcggggcgtttcctcgtccatcttccgcaagaagaccacatcggcgtgtcccaacgcatcgaagacgatgccgaacgcagcagcctgcgcgaacgcctcgacaagctcctgccggaaaatgcctgccggggctacatcatccgcaccaacgccgaaaacgccaccgacgaacagctccagtccgacatcgactacctgaccaaagtgtgggaacacatccaagaacaggcgaaaatccggccgcccgaaaccctgctttatcaggatttgcctttaagcctgcgcgtgttgcgcgatatggtcggctgcgacacgcaaaaaatcctcgtcgattccaccgtaaaccacgggcgcatgacgcgttttgccgaacaatacgtccacggcgcattgggcaggatagagctgttcaaaggcgaacgcccgctgtttgaaacccacaacgtcgaacaggaaatcagccgcgccctgcaaccgcgcgtcaacctcaacttcggcagctacctgattatcgaatccaccgaagccatgaccacgatagacgtgaacaccggcggcttcgtcggcgcacgcaacttcgacgaaaccatcttccgcaccaacctcgaagcctgccacaccatcgcccgcgaattgaggctacgcaacctcggcggcatcatcatcatcgacttcatcgatatggcacaggaaagccaccgcgaagccgtgttgcaggagcttgccaaagccctcgccttcgaccgtacccgcgttaccctgcacggttttaccagcctagggctggtcgagctgacgcgcaaacgctcgcgcgaaaacttaaaccaagtcctctgcgaaccctgcccttcctgccaaggcagaggccgtctgaaaacgccgcaaaccgtatgctacgaaatccagcgcgaaatcgtccgcgaagcgcgccgttacgatgccgaaagtttccgcatcctcgccgcccccaacgtcatcgatttgtttttggacgaagaatcgcaatccttggcaatgctgatagatttcatcggcaaaccgatttctctggcggtcgaaaccgcttacacgcaggaacaatacgacatcgttttgatgtaaaaaatgccgtctgaagccttcagacggcatctgtctatttcagggtttccttgtccaacaacgcgcgtatcagcagaccgcgtccgaaacgtcggctgtcggacaattccaaatatccgccgtattttttggcaagcgtgtcggcgatggacagacccagccccgtcccctgctgctccgttcccaaaatacggtaaaacggatcgaggacacgggcgcgttcggattcgggaatgcctttcccgttatcttccacccacacggcaagatatttcccttcgtccgtgaaacccaaatctatcctgccttcgggcggcgtataacgtaccgcgttgtcggcaaaggttttaatcagcgtatagatttccgtttcgtcggcagacacttcgacatcgcctccgaccgccacgccgatgtcctgacatttttccaaagccagcggcatcagttcctgcaacacttggcggaaacggctttgcagaccgaatgtcgttttcgtcagagggatttcatccgactgcgaacgcgccaatgccaaaagctgttcgagcaggtgtttgttacgccgtatgctttgctgcaaaacggcaggctgccgcgccgcatcgggtgggagcggcatattgttgagccgttccgcctgaaggggaagggcggtcatcggcgtacgcaattcgtgtgccgcgtcggcgacaaaccgctgacggtggcggatgtcttcatccgcacgtttcaaaagcaggttgatggcggttacgaaacctctgatttcactgggaatattgtccacactcaaagcagacaggtcattgattcggcgttgttcgagactttgcgacaatttgcggacggggcgcatggctttgtgcgtaatccacacggtcagcaaaatcatcagcggcagtgccgccaacaggggcaacacgctttgccgtgccgcatccgccgccaaatcttcacggtattcgttttcctgcataacggcaatccgtccctgctcggtcgtgcggatatagacgcggtaataatcgtcgtcatcgtccgcctgaagcgtgtgcagaccgtccgccagatgcgcaggcaggctgacaacagggtcttcctgctgcggcatctgtaccaaaatacgcgtatcgccgtcgccctcgggcaaagtttcgggtttggaatcgggggcgacgtacaatgccgcctgacggagcaggtcgtcctgcaacgcttccgtttcgtggaaggtttcgtagtaggaaaacatacctgcaagcattgccagcggaacaaacatccaaaccgtcccgccccggcaaacccaaatccagcagcatcaagtcataaggctgggcagcggcagccgcgcgccgtttttgacccaatccaccgcatagccgccgtctttcaaacttgccgacaccgcctccgcaatcatcgcatcgtcttccaccagcaaaacacgcatcaactttcccttcaaaataaaccgtgcctattctaacaccccaaaattagccgcaatttagcggtctttacgcttgccggtatttttcaaaactgcagcacaaaaaaaccgcgccggcaactgccttcagacggcattggggcgcgattgcaacacacgggcaggcaggcagagcctgcgacagaccacaggaacgattcaggcttcagacggcttcgccgtttacggcagaggcacgattcctgccgctatcgaactggccaatatcgccagcgacaaaccccacgcccagaaaaacgaataacggatgtgtttgcccatcgacaatttcgccaaacccaagcccatccacaaagccggcgaaagcggcgtaacaaaagtgccgacgatactgccgatcaacatcgcataacctgctgcttcgggcgccacgcccgcctgcgaggtaatctgctccacaatcggaaacagtccgaaataataagcgtccgtactcaaaaccaactcaagcggaatgcccaacacaccgatggcaatatgcagataaggcagcagcgcgtccggcaggatatgcacaatgtctttggaaatcgcgtccaacatccccgcacccttcaaaatccccaaaaacgtacctgccgccaaaataatggacgccatcatcaccgcgccgccggcgtgggcataaatccgctccatctgttcctgcgggctgcggtaattcaaaagcaacgccgccgttgcagccagcataaatacataacccggtgggaagatgcccgaaaaaagcaggctcatcgccgccaaaaacagcaggacattccaccaaaacagtttcggacgcgccaatttttgttcttcttccgacaaaggcaccggctttatcaaatccgccacggcgggcaacgcgcccaactcccggacaatccgccttttttcacgcacacccaaaagcagggacagcgcaaggataaacaccacaccgataatttgcaccgtcaacaaaggtttatacaattcgcccacatctgcgcccaacacgcttgcaacccgcccggtcggcccgccccacggcagaaggttaatcaatcccgcactggaagtcagcagcaaaaacagcaggtaaggattcatatgcagacgcttgtaaagcggcaaaagggcggggacgaccaataaaaacgtcgtcgcacccgccccgtccaactgcgccaccaccgacaccaagaccgtccccacactcactgccacgatattaccccgagtcagcttaatcaaaccgcctatcatcggacggaacagccccacatcgttcatgattccaaaaaacaaaatggaaaacataaacataatcacaatctgcatcaccgatttggtgccgcccgaataaaattcttttaattgggatacatcaaaccccgccagcaacgccccaaacagcggcaccaagattaatgcgatgatgggcgacactttttccgtcagcagcagccatacgatgaccccgataatcagcagtccgataaacgtcagcatcatttctcctttattttattttaaacagaaaaccgaccgtgcaggcaaaaccgcccacagacgcgggataagccctgcattctacttttttattttgaaacaagtcaatcggtcatttcctcccatttacgcctgccgccattcctgcatccgtccgtcatttcacagcggcaaccgatacggaacaaccggtaaatcggtatcgggacggcgcgggggcattcatcccggtgcgccgattcaaacgaaaccgcccctatcattgcggagcgcggggcgtgccgtacacgcgggattttatagtggatgaacaaaaatcaggacaaggcggcgagccgcagacagtacaaatagtacggaaccgattcacttggtgcttcagcaccttagagaatcgttctctttgagctaaggcgaggcaacgccgtactggtttttgttaatccgctataaacacgccggtcatttgccgcgcattatccggcaaacggcaaaccttgacgctgcccagcccatataaaaaagccgcaaaacccgaaccggttttgcggcctttcgacttggtttgtttatttggcatttctttcaatcaaaccgacaaactgattaatatatgactgaacaaaatcccttgccgagtcaatcaatttgccgttttcatcaaacagcgtcggcgaattgcccaaaaacacttccggctgtccggttacgggcatatcgaaataagacagcgcaaggcgcaggtttttttgggaactgtaaccgcccatcttgccgacggaatggctgatgatgcctgccggtttgtttttccacgccacgtcggcattcggtttcgagccgatgtccaccgcatttttcaaacaggcgggaatggtgcggttattttcggacgtaacgaacaaaatgccgtccgaagccttaatcgtttcgcggaaagccgtgtagctttcgggtagcggcacatcttccaccgcagggtcgtcataatcgaaattgtaaagcggcagatgtccgatttcaacgatttccgcctgccagccttcggggaacatctccgccgcattcaatgccactttgcgcgcaaaagaagcacggcgcaggctgcccaccaaaatactgattttcttagccataatcattcctcctgaatattaagtttgtgcgtctcaatcatttcataatgatagcgattattatatatgtgatttcccctgcaaacaagccggcccgccgccacagcgttcccacttatccggctttgccttataattgctttttttatgtaacagatttacctatgaatttccccaaaacagcggcctccctgctgctgcttctcgcctccctcgccgcacacgcgctcgataccggccgcattccgcaaaacgaaatcgccgtatatgtccaagagcttgacagcggaaaagtcatcattgaccaccgctcggatgtccccgtcaaccccgcctccacaatgaaactcgttaccgcgtttgccgccttcaaaaccttcggcagcaattaccgctgggcgaccgagtttaaaagcaacggtacggtaaacgacggcacgcttgacggaaacctatattgggcgggcagcggcgaccccgttttcaatcaggaaaacctgcttgatgctcaaaaacagttgcgcgaacaaggcatactcaatatcacgggacacctgatgctcgaccacagcctgtggggcgaagtcggcagccccgacgatttcgaagccgacagcggttcgccgtttatgacgccccccaatccaactatgctgtctgccggtatggttatggtgcgcgccgaacgcaatgccgccggcagtaccgacatcctcaccgatccgcctttgccgcatattttcgcccaaaacaacttgaaaattaccgcctcccaagctgcctgcccttcgatcaaaaaactgatgcgtgcatctttttcggacaatacgctgaaattgcgcggcaatattcccgagagctgtttgggcaagcctgtcggtgtccggatgttcgcgcttgacgaactgatccggcaaagttttaccaaccactggctgctcggcggcggacggatttcagacggtatcggcatagccgacacgccggaaggcgcgcagacacttgccgttgcacacgccaaaccgatgaaagaaattttgacggacatgaacaagcgttcggacaatctaattgcgcgttccgtcttcctcaaactcggcggcgacggcaaactgcccgccgtttccgaacaggcggcgtctgccgtccggcgcgaacttgccgtatcgggcatcgatgttgcggatttggttttggaaaacggttcgggcctgtccagaaaagaaagggtaacggcgagaatgatggcgcaaatgttggaaacggcttatttcagcccgtttgcacaagatttcatcgacacgctacccatcgccggcacagacggaactttacgcaaccgcttcaaacaaagcggcgggctgttgcgcttaaaaaccggcacgctcaacaatgtccgcgcccttgcaggttattggctgggcgacaaaccgatggcggtggtcgtcatcatcaacagcggccgcgccgtttccctgctgccagacttggacaacttcgttgccaacaacatcatctccggcggcgatggctggctggatgcgaaactgatgtgcaaagaacgccgagcctgaaacaggaaaatatagtggattaaatttaaggggctgtcctagataactaggacaaactcgattttactaattgttttaaaatggaacaagaacttttatctcactgttgttaaaacgccattcgcactcctttaaatacagctcaaaatgcgctttgggaatgccgttaaacttgcgtaaatgacgttttgcctgattccaaaagttctcaattccattaatatggttttgtcgttcggcaaaatgtgtgctgtgattgatacgaaaacgaagtttcagcgaagctaaaatggctaaattcgcgcacatctaatacatcatagctacgataacaatccgtataaacaatactgtcaggtttcacttgttcacggataataggaaataaagtagcggtttgagtattcggtactgtaaccgtataaaccttaccatttcgcttcaaaagaccgaatacggcgactttaccggcagcaccgcgaccgcgtttgcctttgcgttgtccgccaaaataactttcatctgcttctacttcgccatcaaacatttccaaatgcggactgttttgataaataagtaatcgtaaacgatgaaaataataggctgcggtatttttattaacgcctactaactctgctgccgttcttgcagttacacctgcgacaaacagttcaatgagtttattttgtttataccggcttagacgactttttctcataggggcaactctaacttaatttgaatttccctagttatctaggacagccccaaatttaaaccagtacggcgttgcctcaccttagctcaaagagaacgattctctaaggtgctgaagcaccaagtgaatcggttccgtactatctgtactgtctgcggcttcgtcgccttgtcctgatttttgttaatccactatataaaaatgccgtctgaactgttcagacggcatttttgattttcaaaccggaattacagccccgctgccgccctcaatgcagcagctttgtcggtgcgctcccaagtgaactcaggttcttcgcggccgaaatgtccgtaagcggcggatttactgtaaatcgggcgcaagagatcgagcatttggacgatgcctttggggcgcaggtcgaaatgttcgcgaactaaggcaatcagtttttcttcgctgattttgccggtgccgaaagtatcgatggaaatcgaagtcggttcggcaacgccgatggcgtaggaaacttggatttggcattgggttgccaaacctgcggcgacgatgttttttgcgacatagcggcaggcgtaagcggcggaacggtccactttggacgggtctttgccggagaatgcgccgccgccgtgcggagccgcgccgccgtaggtatcgacgatgattttacggccggtcaaaccgcagtcgccttgcgggccgccgataacgaagcggccggtcgggttgatcaggtatttggtttcgtcggtcagcagttcagacggcagaaccggtttgatgatgtgttcgattacggcgtttttcagctcttcgtaagcgatggacggatcgtgctgggtagacaggacgacggtgtcgatgcgttttactttgccggtttcgctgtcgtaaaccacggtcagttgggctttggcatcaggacgcagccaaggcaggcggccgtctttgcgcaattcgctttgacgctgcatcaggcggtggctgtaatagatggcaaacggcatcagggtaggggtttcgtcacaggcatagccgaacatcaaaccttggtcgcccgcgccctggttcaagtcgatgccttcgccttcgttcacgccttgggcgatgtcgggggattgctggtcgtagtacacgccgactgcgcagccgttggcatcaaagcccagctcggaggagttgtagccgatgcgtttgatggtttcgcgtgcgactttgatgtagtctacttgggcggtggtggtaatttcgcctgccaatacgcacaagcctgtgttgaccaaggtttctgcggcgacacgtgcttttgggtcttgcgccaagatggcatccaaaatcgcatcggatacttggtcggcaactttatccggatggccttcggataccgattcggaagtaaacagatattcgctcattgagattttccttgaaaaacaaaccatcttcttcagacggcatgttgtatgaacataatgtcgacagcgggaaatatagcaaaatttccctattcataccattcagttgagaaatattcccatttgaatagcactttggaatctctgcccgtacgtttcttacaggcaaaaaaattcccgcatcaagcgggtttggattgctctggtgagccacatcggcttttcaaccgtccaccttacttttccttttgaaaagcaggttggcatggaattcccaactcttaatgcagcacgcatcgtagcagaaaaggcatattgccgcaatacttccctttttcagacggcatgtttcgtttacaattcaggctgtttccccctttgcgaaccgccatgcacatcctgttgaccgccctgctcaaatgcctctccctgctgccgctttcctgtctgcacacgctgggaaaccggctcggacatctggcgttttaccttttaaaggaagaccgcgcgcgcatcgtcgccaatatgcggcaggcgggtttgaaccccgaccccaaaacggtcaaagccgtttttgcggaaacggcaaaaggcggtttggaacttgcccccgcgtttttcagaaaaccggaagacatagaaacaatgttcaaagcggtacacggctgggaacatgtgcagcaggctttggacaaacacgaagggctgctattcatcacgccgcacatcggcagctacgatttgggcggacgctacatcagccagcagcttccgttcccgctgaccgccatgtacaaaccgccgaaaatcaaagcgatagacaaaatcatgcaggcgggcagggttcgcggcaaaggaaaaaccgcgcctaccagcatacaaggggtcaaacaaatcatcaaagccctgcgttcgggcgaagcaaccatcgtcctgcccgaccacgtcccctcccctcaagaaggcggggaaggcgtatgggtggatttcttcggcaaacctgcctataccatgacgctggcggcaaaattggcacacgtcaaaggcgtgaaaaccctgtttttctgctgcgaacgcctgcctggcggacaaggtttcgatttgcacatccgccccgtccaaggggaattgaacggcgacaaagcccatgatgccgccgtgttcaaccgcaatgccgaatattggatacgccgttttccgacgcagtatctgtttatgtacaaccgctacaaaatgccgtaacgaaaataaaaatgccgtctgaacaatttcagacggcattttgtcatctgacgatttccgacagcggccagcgcggacggacattgaacgcaccgacctccctgcccttgcccaggtgcatcgcaccggcaaaggcaatcatggcaccgttgtccgtgcagtatgccgtcggcgggaaaaacacgctgactttttcggacggatgtttcggcttgcctttgggggtcgggatttgcaccgtcatgttgccgaaagtttcacggagcttgcggtttgcaccgaccccgccggcgaccactacggttctgaaccctgtctgcaacagggcttttttcactttcgccgccaacacatcgactaccgcatcttgaaacgcacggcagatgtcgttgcgtgtctgctcaggaatgtcatccgccccgttttccgcgcgcactttctcgacggcggtcaatacggcggttttcaaacctgaaaaactcatctgcaaatcgtcggaatgaatcatcgggcgcggaaaaacaaacgcttcgaacctgcccgattccgcaagttccgacagtttcgcaccgcccggatacagcaagcccagcagtttcgccgttttgtcgaatgcctcgcccgccgcatcatcgacgctctcgcccaaaagcgcgtagtcgcctatgcccctgaccgccataatctgcgtatgcccgcccgaaaccaacagcgcgacaaaaggaaagtcgggtttttcctccgccaacagcggcgacagcagatgtccttccaaatgatggacgggaataacaggcttgtccaacgctaaagccagcgcgttggcgtagctcgaacccgccagcagcgcgccgcccaaaccgggcccctgcgtaaaggcaaccgcgtcaatgtcgccatacgatgcgcctgcctgcgccagacagccttccgtcaacggaacaaggcggcggatatggtcgcggcttgccaattccggcacaaccccgccgtattcggcgtgcattgccatttgagtgtgcaggcagtgcgcccgcaatccacgttccgtatcgtaaagcgcaacacctgtttcgtcgcaagaagactcgattcctaataccaacatggtctgatgccgttaaaaactgaaaaacgtattttagcggatttcggcacgactgccgtatcccaaaaacggaacatgccgtctgaagaccgttcagacggcatcgtcgcaccgtatcaaagcgttccgtaagaatgcagcccgctcaaaaacatattcacgccgataaaggcaaatgcggttacgaacaaaccgataatcgcccaccacgccagcactttgccgcgccaaccggcaaccagccgcaagtgcagccaaacggcgtaattgagccagacgatgaacgcccacgtctctttcggatcccaactccaatagcgtccccaagcatctgccgcccacagcgcacccaaaatggtggcaatggtaaagaacagaaagccgacggcaatcgccttatacatcacctcgtcgatcaatgccgacggcggcagccacagttttccgccttttccttccgcacgcagggaaaccagttcggcaataccgagcatcgcggaaatgcaaaacgcgccgtaaccgataaagtttgccggaacgtggattttcatccaccaggactggagcgcgggaatcagcggctggatggtatgcgcctcgcgggacacgctgtaccacaagacaaatccaaccacgaccgccataaagccgaacacgaagccgcccaatttctgtatggcgaacttaccttcataataaagatacatcagcgcggtaatcaccaaaaacaggatgaacacttcatacaggttggaaaccggaatatgccccgcatcgggacggagcagatagctttcgtgccaacgtaccagcagaccggtaaagcctgctacggcagacacccatgcaaacacggttcccatacccaacagcgtgttggtcggcacattttttacgcttgccaaaaccgcgcccgaaatataggcgaacagggcgaaaaagacaaaggcgcactgccacatgatcgccgactggctgctgaggaaataccgcaacaggaaaatctctgccgatttgatgtcgcctccgtacaaaccgacggcggcataggcaagcaatacgcttaaaggaacaaaccagcgcatcggtttgaaaaaccaacccaaaaacacggcaataccggcacttgcccacaacatgaccgtttcgtaaatgtccatatgcataccggaacgggtctgtacgaaaaccgtagccgcaaaaaccagcacggcaaatacccaatcccaaagattcagattgctgatcaaagacttctgaatcagcagctcgtgttccggaagggttttatagtgttcagtcatgattcaagtccttgccgagccgttgcagactctcgacgtgttttggaaattccttctgcaaatcccgttcgctgcgggccgaagacatggcaaaacggattttgccgtctgaaaacaatacccacgcccgtttttcgcgcacataaaacatcaataccgtacccaataccaacagcaccgagccgagatagaccaaaagcgcacccggggaacgggtcatctgcaaacccgacgaacgcacctcggaaaacccatcaagttgcagcagcataggcgcgggatattcggtcaaacccgtgtacgcatccatactgtgcagcaggaaacgattccgcgcttcatcctgctgccattcgggcaagccgtaccggcgtatggtttcatccaaagcagcgttcatcacgccgtaaagcatttcgtagaaatagccctgcatcttatcctgctgctctttcgggatattggacgtaataaattcgtccaatcccaaatagcctttttgtgcaaagatgttcagcgtgttttccgcagccagcatgaattgttcgcggatttcggcaggtgcgcctttggttgcgtcggcaaccagacgtttgcgcccttccccatctttcaaaaactcacgcaatgccataaaggtgtccgctttcaactgcttgtccaaggggatacgcagccagcggtattgctgctgcaagccgctgcgcgtgccggtaatccaaaaataatcctgttcctgcaaaaccggcagcatatagtttttatattcgaccgcctgccctgccgcatcacggatacggtaaacaatggaagggccgatattggtgtattttttaccttcctgagtaacggcgcggacatcgttcagcgtggatttcaggcttttttcccgttccgcgccctcgctcatgtcctccacattcatagaagtgaactgatcgaactcaagacgatatttgtgtttgccaatttccaacggaaactggtgtatggatgttgccttcaacacgacaggctcgcgcgaagcatcacccaaattccacgccttgaatgtcaaatccgaaccgccgtcggcaaaactcgcctgataaatcgtgatgccgtgcaaggtcaaaggatggttcacgcggatggtgcgctcgagtttctcaccggttgccttgtccgtcacttcaatatcgctggcgaaatcacgcggcatacccgtattgtaaaaatcgatatggaattttttcagtttgacttcaaaaggcaagtcctgaaccaatatcccgttgtcggcattcaggaaaaccacatccgcactctgcccctcggaaatattgacgttgcccctaaatgagagattggacgcacccaaaatactttcgggcttgaaatccttggcataaaccgcctgattgtccggaacaatccgaccggtcagcatacccagtttcaacagcaggttactgtctatcaacccgcccaggcaaatgacaatcaaagcaacatgggcaaagatatagccccatttgttcattgtgccttttttggcggcaatcagaaccgacccgtcttcacggttaatggtttttccctgaaaaccttgtacttccagataacgtttggcaacctcgggcgcaatttttacatccaacagcgaagaatggcgcatcgccgccagagatttttctttaaccttttcccgaaaagacttcatttcgcgccagaacggcggcacattgcgaatcaggcacaaactggtagaaaccaccaaaaacatcatgataacgacaaaccatgccgaagcatagacgtcatacagtcccagaaaaccaaaaatctgcgcccaaaacgatccgaatttgaccaaataatccgtctgcggctggttttgctgcaacaccgtaccgataaccgatgcaatacccagcagactgagcaaagcgactgcaaagcgcatggagctgaaaaaagcgaaccacggacgggaaagaagtgggggagatctacgggatttactcattgtgtgtttattccgccatcaggaatatgggaaagcagaattgggcaaacagaaaacaacgtcccgattctactgtcttgatgctttttatttcaagacaatgaagacagcctgcatcgattccaacggttgcgattgaaaaaacttatcgcagaattgcctgaagccgtctgaaaacttttcagacggcctctaaaacagactattgcggaattaacgcaaaccttggataaagttggcgaccgctttcaaatcttcttcagacatacggtttgcaatatcttccatgatggtatttttacgctgaccggacttgtaggcattcatctgttcaacaatatatgcctgatgctgaccgcccaaacgcggataagcctgaatttcgcttccgcctcccggcatacccgcaccgctcggaccgtggcaggacatacacgccggcacttttttatcgctcaaaccgccgcgatagattttcgcacccaattcgggattttccttaggattggcttcaccggatttgggctgctgtttggcatagaatgcggatacgttcaaaatatcctgatcgctcaaattcattaccaccggtttcatcacagctgccgaaccgtgggtgcgtttaccgtcgcggatgccgatagtttgatgatagatgtaagcagtatgctgtgccgccaaacgcggatacatcgcaatgccgctgttaccgtctgctgcatggcaagccgcacaaaccgttgcggcaacctgtttgcctttttccacgtctgctttgggagaggcggaaaccgcaccggcagccaaaacaaaggccaataaagtcaatcgtttcatggagtgctcctgattacagcattggataacgcaacaatgctctttttatattcaaatacgggatttttgacccgattaaaaccgatgattctgtaaacgtgttattctatactaaatttacattaaattaccactgtgtttcacataaaaccaaccgcatatttttgctgtcggacaaacggcggcggaaaacaaggatatgcccatgaacctttttcaaaacgccaaattcttcacgacgatcaaccaccttaaagacctgcccgacacccctctcgaaattgcctttgtcggcaggagcaatgccggaaaatccagtgccatcaataccctgaccaaccatgtccgtcttgcctacgtttcaaaaacacccggacggacgcagcatatcaacttcttcgagctgcagaacggcaattttatggtcgatttgcccggctacggttatgcccaagtccccgaagcagtacgcgcacattgggtcaatctgctcggcgactatctgcaacagcgcaaacagcttatcgggctggttttgattatggatgcccgccatcctttaaaagaactcgacatccgtatgctggattttttccacacgaccggcagaccggttcacatcctgctgtcaaaagccgacaaattatccaaaaacgaacagataaaaaccctgtcccaagtcaaaaaactgctcaaaccttattccgacaggcaaaacatcagcgtacagctgttttccagcctgaaaaaacaaggtattgacgaggccaaccgaactgtcggaagctggttggacgcagcagatgccgccgcttcctctccagaggaaaactgaccccaattatacggaaaccgtattccccccacttgaccgaccgcaaacatttaaaaaattgccactgccaaatctaaaatgccgtctgaaaagtctttcagacggcattttgcggagtctttaaaacagagaatccaactgctgctgtttggaaccagtattactcggaagcaccggcgtttcctgcatatcttggcggacttcgtcatccgccgcctgccgtccgccttctgccgcgcccccgtcatcttcttttgcccgtcgggaaggttgcggcgcaataccgctgttgtccagcgtcaagcccggatcggttaccatacgttccttcatatagtattcgccattgctgctgaccacaccttcaggcattttcatccccttgccctgctttcctttcaacgcaaaacgcatatagtccacccaaaccggcaccgcaatcgtaccgccgtagccgacacgccccatactcttaggtttgtcgaagccgatatatacggcagtaaccacatcagggttaaaaccgacaaaccacgcatccttattgtcattggtcgtacccgttttaccggcaatatccgttcttcccaacgcagctgccccccttgccgtaccaacacggaccacatcctgcataatcttatacataatataggcattgcgcggatcgattgcctgaggcgcattttgcccagccaccaaaggttgcatttgggcgcgcaacctgccgtctctgtcataaatcttatcgattacgtgcgaagaaaccctatatccgccgttcgcaaatacgctatatgcctccgccactttcaacggcgttgtctcgcccgtacctaaagccatagacaggcttgccggcagctcggacgacctgaagccgaaacgccggatatactgttgcgcgtaaccgacaccgatagacatcaaaatacggatggaaaccatattcttggaagccgtcagagcctgtctcaaagtaatgtagccggaatatctgccgtctgaatttttaggtgtccaaaccgaaccgttcggccctttccccggcagggaaatcggcgcatcgttaaccactgtggacgcggtcatccccttagataatgccgccgaatagacaaacggcttaaaggtcgaacccggctgccgcattgcctgaacggcacgattgaatgttttgctgtgaaaatcataaccgccgaccagcgcgcgcacagctccggtttttgcatccagcgaaaccaaagccccctgcagcaacggctcttgaaccaccgcccaacgcccgccgttgtttttgacacggatgaccgcgcccctgcggatacggtcctcccccattttttcattattgaccgcgcgggccgcaaaacccaaggcgcgcctgtcaagcgtaacccgcctgccgccgggcagctgtatgacgacatttttctttttagtcacatccaacacaacggcgggaaccattttatcgacggtatagagtcccgacagatactggctgacagtctcctcgacatcttcactcttactcaaatcgatatagttttccgcaccgcggtagctgctgccgcgatcgaaattccgtagagccttgcgcaatgcctcggttgccaccttctgatgatcggcgcggaccgtggtataaaccttaaaaccctgcgtataggcatcttcaccgtatttctcatacagttcctgacgcaccatttccgccacatataacgcactctgatcgattttccgaacaaaccgctcgtaatgcagttcctcattcaacgcctgatcgcgctgttgcacggtaatcatcttctcctcgagcatattgttcaaaatatacttctggcgcaacttggcacgttctggattaacaatcggattataggcagacggagccttgggcagtcccgcaagcatggcggcttccgccaaagtcaaatctcggacattcttattgaaatagatttgcgcggcagatgcaaaaccataggcgcgctgaccgaggtaaatctgattgaaatacaactcgaggattttgtctttgcttaaagactgctcgattttataggcaagcaacacctcattgaatttgcgtgtgaacgttttttcactgctcaaataaaaatttttcgccacctgctgcgtaatcgtactcgcacccgactgcacgctgccggacacgacattgccgacggcagcgcgggcaacaccccaaacatccaccccccaatgccggtaaaagcgtttatcctcggcggcgataaccgcattccgcaacacctctgggaaatcgccgatttttgtaaattcgcgccgctgctccccatacataccgatgacttccccatccgccgaataaatagtcaacggcattttaggctggtaatgctgcaaagaatccaaagacggcagtttcggatacgttaccaaaatagcaatggcaaccaaacccactccaaatacacaaaacccaaaaaccaaaccaaaacaagtcgttaaaatctttttaatcatagctgaataataatttaccattattggtattaaataaagtaaaatagcaaccgatttctacaaagcacggtttcaatgtgcaaagaacaaggaatccattacggataccgaaacggttactcactgtacaaataaagcaggaactttcatcatgcgcttgtttaaaagcttgaaaaaccctaaaaaaacagatgccaagctccctaaaaaatcttcgggactcaataaccgcgcggcaatcggcatcgatatcgaccagcattccatcaaaatggtccaattgtcaggacgtagtttaaaccaaattcaattggaaaaatacgtcattgccaaattaccaaagaatatcattcaaggcaataaagtccaaaattacgatcaacttgttacatatttgcaacaagcctatgccaaactgggtacttcgtgcaaaaacatcatcgcgtccgtcccgcaaaatttggcaaccatcgaacaattgacctacacagacaaagatgcagaattagacctgcaggggttcgtggagtcctccatctccgaagtcagctcgatatcgctcgaagaagccaattacgactatcaggtcttgtcccaatcggccgccggcgaagctgtgttggccgtcgcatcgagaaaggatgaaatcgaacccctgattgacgcattcaacgccgccggtatgaaattatccgcgcttgatgtggacattttcggacaatacaacgcctacgcgctatggataaaccatttcgcccccgagcttgcagccgaaaaagtcgccattttcggcgtatatgccgcacagacctacgccttggtcatccaagacggaaaaatcctatacaaacaggaaacctccgtcagcgaagaacagctcaaccaactcatccagcgcacctatcaggtaacagaagaaaaagcggaagaaatcatcaactccccgcaaaaaccttccgattaccaagaaagcgtggcaaactatttcaaccagcagattacccaagaaatacaaagggtcttgcagttttattacaccacgcagaccgcagacgatatgaccgacatcaagcatatcctgctgaccggggaagcggcgcgccaggaaggcatcgcccaaaccgtcgcctcacaaaccaatgcagatgtacaatgcgtccatcccgcgcgttattttgcggacaacctcaaaacagacaaacaacaattcgaacttgatgcgccgacactgaccagggcgttcggtttggcggtacggggattataattatgaacaatttaatcaaaatcaacctcctcccctacagggaagagatgaacaagcgcaaacagcagcagtttaaaacgctgatgtacggtgccgtgctgacgggcgttgccgccgttgcggcaacctacctgtttatcgacaatatgatcaataaccagtcggaaagaaacacgctgctggaaacctccatcgcacacttggataccgagctgtcggaaatacaaaagctcaaacaggaaaaagatgccttcctgattaagaaaaacaaaatcgaggagctccagctcaaacgcctccaagccgcaaaaatcctcgacagcctgaatgaggccgtccccggaagcacctacctgacctcgctggatgccgttaccgccgactcttatcggctcagcggcaggacatccagcgacaaccgcgttgccgccatgatgagggcgatgcccaataccggcatattcaagcaacccgaattgttaagcatcaagaaaaacaattcgcatcaagaatttacccttcaggcaacattacaacccatcgtaaaggcggccgaatccaaagagaatccggcttcgggaaacgcacaggaggcaaactgaatggcttctaaatcatctaaaaccaacttggatctcaacaaccttcacctgctcaaccttcctgccaggctttttatcgccctgctggccgttgccgccgtgctggggctcggttatgccggattgttcaaaagccagatggaatcccttgaggaatacgaagcaaaagaaaccgaactgaaaaacacctacaaacagaaaagtatcgacgcggccagcctgaacaacctgagggacgaacttgcctcaatccgctctgccttcgatatcatgttgaaacagctgccgacagatgcagaaattcccaatctggttcaagagcttcatcaggcaggttcgagcaacggtctgcgcttggacagcgttatgccccaacctcccgtagatgacggccccatcaaaagattaccctattccatttccattaccggaaattacgaacagatcagccaatttacccgcgatgtcggcagcctctcccgaatcattacccttgagtcgctgaaaatcgcccaatctccggaaaacggcggcaatcctgacggcaagagcagcatcctgaacctcagcgccattgccaccacctaccaagcaaaatccgtagaagagcttgccgcagaagcggcacaaaatgccgagcaaaaataacttacgttagggaaaccatgaaacactatgccttactcatcagctttctggctctctccgcgtgttcccaaggttctgaggacctaaacgaatggatggcacaaacgcgacgcgaagccaaagcagaaatcatacctttccaagcacctaccctgccggttgcgccggtatacagcccgccgcagcttacagggccgaacgcattcgacttccgccgcatggaaaccgacaaaaaaggggaaaatgcccccgacaccaagcgtattaaagaaacgctggaaaaattcagtttggaaaatatgcgttatgtcggcattttgaagtccggacagaaagtctccggcttcatcgaggctgaaggttatgtctacactgtcggtgtcggcaactatttgggacaaaactacggtagaatcgaaagcattaccgacgacagcatcgtcctgaacgagctaatagaagacagcacgggcaactgggtttcccgtaaagcagaactgctgttgaattcttccgacaaaaacaccgaacaagcggcagcacctgccgcagaacaaaattaagaagaggattactccattatgaataccaaactgacaaaaatcatttccggtctctttgtcgcaaccgccgcctttcagacagcatcggcaggaaacattacagacatcaaagtttcctccctgcccaacaaacagaaaatcgtcaaagtcagctttgacaaagagattgtcaacccgaccggcttcgtaacctcctcaccggcccgcatcgccttggactttgaacaaaccggcatttccatggatcaacaggtactcgaatatgccgatcctctgttgagcaaaatcagtgccgcacaaaacagcagccgtgcgcgtctggttctgaatctgaacaaaccgggccaatacaataccgaagtacgcgggaacaaagtttggatattcattaacgaatcggacgataccgtgtccgcccccgcacgccccgccgtaaaagccgcgcctgccgcaccggcaaaacaacaggctgccgcaccgtctaccaagtccgcagtatccgtatccgaaccctttaccccggcaaaacaacaggctgccgcaccgtttaccgagtccgtagtatccgtatccgcaccgttcagcccggcaaaacaacaggcggcggcatcagcaaaacaacaggcggcagcaccagcaaaacaacaggcggcagcaccagcaaaacaacaggcggcagcaccagcaaaacaaaccaatatcgatttccgcaaagacggcaaaaatgccggcattatcgaattggctgcattgggctttgccgggcagcccgacatcagccaacagcacgaccacatcatcgttacgctgaaaaaccataccctgccgaccacgctccaacgcagtttggatgtggcagactttaaaacaccggttcaaaaggttacgctgaaacgcctcaataacgacacccagctgattatcacaacagccggcaactgggaactcgtcaacaaatccgccgcgcccggatactttaccttccaagtcctgccgaaaaaacaaaacctcgagtcaggcggcgtgaacaatgcgcccaaaaccttcacaggccggaaatctcccttgacttccaagatgtcgaaatccgcaccatcctgcaattttggcaaaagaatccggaatgaacattgttgccagcgactccgtcaacggcaaaatgaccctctccctcaaggatgtgccttgggatcaggctttggatttggttatgcaggcgcgcaacctcgatatgcgccagcaagggaatatcgtcaacatcgcgccccgcgacgagctgcttgccaaagacaaagccctcttacaggcagaaaaagacattgccgatttgggtgcgctgtattcccaaaacttccagttgaaatacaaaaatgtggaagaattccgcagcatcctgcgtttggacaatgccgacacgaccggaaaccgcaacacgcttatcagcggcaggggcagcgtgctgatcgatcccgccaccaacaccctgattgttaccgacacccgcagcgtcatcgaaaaattccgcaaactgattgacgaattggacgtacccgcgcaacaagtgatgattgaggcgcgtatcgtcgaagcggcagacggcttctcgcgcgatttgggcgttaaattcggcgcgacaggcaagaaaaagctgaaaaatgatacaagcgcattcggctggggggtaaactccggcttcggcggcgacgataaatggggggccgaaaccaaaatcaacctgccgattaccgctgccgcaaacagcatttcgctggtgcgcgcgatttcctccggtgccttgaatttggaattgtccgcatccgaatcgctttcaaaaaccaaaacgcttgccaatccgcgcgtgctgacccaaaaccgcaaagaggccaaaatcgaatccggttacgaaattcctttcaccgtaacctcaatcgcgaacggcggcagcagcacgaacacggaactcaaaaaagccgtcttggggctgaccgttacgccgaacatcacgcccgacggccaaatcattatgaccgtcaaaatcaacaaggactcgcctgcgcaatgtgcctccggtaatcagacgatcctgtgtatttcgaccaaaaacctgaatacgcaggctatggttgaaaacggcggcacattgattgtcggcggtatttatgaagaagacaacggcaatacgctgaccaaagtccccctgttgggcgacatccccgttatcggcaacctctttaaaacacgcgggaaaaaaaccgaccgccgcgaactgctgattttcattaccccgaggattatgggtacggccggcaacagcctgcgctattgatgcgtcaaaataagggcatatgttttacggcatatgccctttctttatgctttttgccgcgaccgaaatgccgtcattcccgcgcaggcgggaatccagtccgttcagtttcggtcagtttcggtcatttccgataaattcctgttgcttttcatttctggattcccacttttgtgggaatgacggcggaaggggtaaatcctcacaacccaaagcctcgtcatttccacaaaaaacagcaacccgaaacagcaacttaaaaccccgtcattcccgcgcaggcgggaatctaggtctgtcggttcaggaacttatcggataaaacggtttctccaaccctgcgttctagattcccactttcgtgggaatgacgggatatgggtttccgtgcggacgtgttcggatttccgcctgcgcgggaatgacggcgacagatgcccaacggtctttatagtggattaacaaaaatcaggacaaggcgacgaagccgcagacagtacaaatagtacggaaccgattcacttggtgtttcagcaccttagagaatcgttctctttgagccaaggcgaggcaacgccgtactggtttttgttaatccactatagtattgataaacatattatcttcaatatattcaattggataattgtttacctaagcaaagataattgccttttcctgacaaataagtgaaatcaacggattgtcaaaacacagcctgaaataaaaaacctccctgatttcttttatttgtccttaaaatcagaaaggttcgggatggtcgggttatttttccaaacgtaccgccgccctgccgatttcgtataaaattccgccgtaacccgacaagcccgaaccctgtcgccccgaaaggcggggtgtcaaacattaaggaattgtgatgaaaaactttaacggcaaactcatcctcatcggactgatgggcgcgggcaaaaccacgctgggccggcaaatggcgcagcggctggattaccgtttttacgacagcgatcacgaaatcgccgcagccgccggcgttcccatccccaccatatttgaaatggaaggcgaacagggattccgttcgcgcgaaaccgccatactcaaaaagctggttatcctgccccatatcgtcctgtccaccggcggcggcgcggtgttaaaagaagaaaaccgcgcccttatccgcaaaagcggcacggtcgtctatctgcacgccccgcccgaaaccctgctcgaacgcacgcgctgcgacaacagccgtcctttgctgcaagttgccgatcctttggcgaaattacgtgaactctacgccgcacgcgaccccgtttaccgccaaaccgccgactttaccgtagaatcggcaaactgccgggaaaccgtgcaaaccctgctcaaacgcttatcccgataaaccggcatatgcgccgcgcccagaaaaccaaaccgcgccccgcccggcgggccggcggttcaaactttaaggaacaacaatgaaaacactgaccgtacacaccccgtcccacagctaccccatctttatcggcaacggactgctgccgcaggcaggaagcctgctcaaaccgcatttgggcaaacgcgccgccatcatcgccaacgaaaccgtcgccccgctctacctcggcacgcttcagacggcattggatgcggcaggcgtatcccatttcagcatcatcctgcccgacggcgaggcgcacaaaaactggcagacgctcaacctcatctttgacgggctgatgcaaaaccgcgccgaacgcaaaaccacattaatcgcactgggcggcggcgtgatcggcgacatggtcggctttgccgctgccacctaccagcgcggcgcaccgttcgttcaaataccgaccacgctgttgagtcaggtcgactcatcggtgggcggcaaaaccgccatcaaccacccgctcggcaaaaatatgattggcgcgttttaccagccgcaggcggtgcttgccgacttggacacgctgcacaccctgcccgcccgcgaattgtccgccggtatggcggaagtcatcaaatacggcgcgctcggcgacatcggcttttttgaatggctggaacagcatatgcccgaactgatgacgctcgatcgggaaaaactcgcccaagccgtgtaccgctgctgccaaatgaaggcagacatcgtcgcccaagacgaaaccgaacagggcatacgcgcatggctcaacctcggacacaccttcggacacgccattgaaaccgagatgggttacggcacttggctgcatggagaagccatcgccgccggctgcgtgttggcggcgcgtttgtccgaacaactgggcaaaacctccgccgcagataccgcgcggctcgccgccctgctcgaagccgccggactgccgtccgcgccacccgtgtttgcctttgaaaaatggctggaacacatgagccacgataaaaaagtcagcggcggcatcatgcgctttatcggtctgaaccggctgggcgaagccaacatcaccgaaattaccgacacggacatcctccgccgcaccctgcaaccgtatctctgatttcctctgccgatgtgctgccgcgcgggtttgacgcacgatgatgattttccatcatctttctccgcaaaagcgggaatccagtccgttcggtttcggtcgtttccgataagttcccgttgcttttcatttctagattcccactttcgtgggaatgacggcggagaggtttttgttgtttcggagaagtttctgcaaccctagaatctcgttatttccacaaaaaacagaaaaccaaaacagcaacttaaaacctcgtcattcccgcaaaagcgggaatccggtccgttcggtttcggtcgtttccgataaattcctgctgcttttcatttctagattcccacttttgtgggaatgacggcggaagggttttggttttttccgataaattcttgaggcattgaaattctatagtggattcacaaaaatcaggacaaggcgacgaagccgcagacagtacagatggtacggaaccgattcactcgtgcttcagcaccttagagaatcgttctctttgagctaaggcgagacaacgccgtaccggtttttgttcatccactataacagcaaccctgtcgccgtcattcccgcaaaagcgggaatccagtccgttcggtttcggtcgtttccgataagttcccgttgcttttcatttctagattcccactttcgtgggaatgacggcggaagggttttggttttttccgataaattcttgaggcattgaaattccagattcccgcctgcgcgggaatgacggctcaaaagttacggaacgaaaaacaaccaaaaccggacaagtcggattcccgcctgcgcgggaatgacggaatcttaagtttccgtctttgttttctgttttctgttttcgagggaataatggggaacaagccgtatttcagacggcattttcagttcggggtataatccgaatacttgcgaccatctgaatcattgggacaaaccatgtgtcaactgctgggcatgaactgcaatacgccgaccgatattatgttttcctttgaaggcttccgccgcaggggcggcattaccgaccaccatgccgacggtttcggtatcggctttttcgaaggcaaaggcgtgcgcctgttccacgacgacaagccgagcgtaaattcccccgtcgccgacctcgtgcgtgcctaccaaatcaaatcggaaaacgtcatcgcacatatccgcaaagcatcgcaaggacaaacctcgctggcgaacacccatccctttatgcgtgaaatgtggggcggctactggctgtttgcccacaacggacatttgattgattttttccccgaacagggcgaatttttccaccccgtcggcacaaccgattccgaacgcgcgttctgccacatcctcaaccgcctgcgcacccgctttgccgcccgtcccgacgacgacacgctgtttgacgcgattgcggggctgacgcacgaaatccgcaagttcgggctgtttaactttatgctttcagacggcattgccctgtttgcccacgccagcacgctgctgcactacatcgtccgccaagccccgttcggcaaggcgcgcctgctcgacgacgacgtgatggtcgattttgccgaagtaaccacgccctccgaccgcgtcgccgttatcgccaccctgccactgacccgcgacgaatcatggtcccaacttgccgtggacgaactggtcatgttccgcgaaggcaacatcgtccgacacgaccgtcccgaaaaccccgtctatatgagtgccgaagaaggtctggaaatcgcccgcgccgccggcgtcgccgtctgaacttcagacgacataggaggacgaacccgatgaaatgcccgttttgcgcccaccccgacacccgcgttgccgattcgcgtctgatggaagaacgcaacgccgtgcgccgccgccgccactgccccaactgcggcaaacgcttcggcacgctcgaaaccgccgaactcaaaatgcccgccgtcatcggtccggacaaaaaacgctcgccctttaatgcacaacgcctccgcaacgacctgaccgccgccgcccgaaaatccgccctgacacccgaacagatcgacgaaaccgtccgcctgacggaacacaggctctacacttcgggtcagcgcgacatcccctctgccgcacttgccgacatggtgctaaaagaactgctccgacaagatacggaagccgccgtccgtttcgccgccctgcacaaacgcttcgacaatccggcagactttgcctcgtggctggcgcaagccgtcaaaacaggcggcaaagcctgattcccccaacccatactgatacggtatccctatgttttcggacacagatatatccatgatggaaaacgccctccgacttgccgctttggggcgtttttccacttcgcccaatccgcgcgtcggctgcgttatcgcacacggcagccaaattgtcgggcaaggcttccacgtcaaagcgggcgaaccccatgccgaagtccacgccctgcgtcaggcgggcgaaatggcacaaggcgcgaccgcctttgttaccctcgaaccgtgcagccattacgggcgcacaccgccctgtgccgaagcactggtgcgggcgggcgtgtcccgcgtcgttgccgccatgcgcgaccccaacccgctggttgcaggcaaagggcttgccctgctcgaagcagcaggcatcaagacggaatgcggtttactcgaacatcaggcaagggaactcaaccgaggcttcctgtcgcgcatcgaacgccgccgcccctttgtccgcctcaaatgcgccgtttcgctggacggcaaaaccgccctttcagacggcagcagcttttggattaccggcgaagacgcgcgtgccgacgtacaggttttgcgtgccgaaagctgcgcggtgctgaccggcatcggcacggtgttggcggacaatccccggctcaacgtccgcgcttttccaactttgcgccaacccgcacgcatcgttttagacagccgcctgcgcctgcccccgaacagccatttggttaccgacggacaatctccgacctacatcgccacactcgaacgcaacgaagacagactgcacccctatcgggaacacgcacacgtccgcatcctgatgccgtctgaaacggcagacagcaaaatcgacctgcaccacctgatgcgcctccttgctgacgaaggtttcggcgaaatcatggtcgaagcaggctccgaactcacatccgcatttttggcagaaaatctggcagacgaaatcgtcctgtaccgttcgcccaaaatcctcggcagcggcaaagacctgttttccctgctcgaaaaccgcgccgccctttccgcaccgcccttgtggacacccgtttcaagcgaaatcctcggacacaacatcaaaaccgtgttccgaaaaaacggcaacgccttttaaagggtttgcgccgtttcactatataataacgccgataaaaaacggccccgttcagaccgccgcccgcccgaaaaaacgcaacccggactgccgcaccccgccggcagccgcgacggtctgaaagccgtcaaattccgatcaagaaaggcttcagacggcacaggcagcatcccgccgccgcccggacatcaaaaatggacacaaaagaaatcctcggctacgcggcaggctcgatcggcagcgcggttttagccgtcatcatcctgccgctgctgtcgtggtatttccccgccgacgacatcgggcgcatcgtgctgatgcagacggcggcggggctgacggtgtcggtgttgtgcctcgggctggatcaggcatacgtccgcgaatactatgccaccgccgacaaagacaccttgttcaaaaccctgttcctgccgccgctgctgtctgccgccgcgatagccgccctgctgctttcccgcccgtccctgccgtctgaaatcctgttttcactcgacgatgccgccgccggcatcgggctggtgctgtttgaactgagcttcctgcccatccgctttctcttactggttttgcgtatggaaggacgcgcccttgccttttcgtccgcgcaactcgtgcccaagctcgccatcctgctgctgctgccgctgacggtcgggctgctgcactttccagcgaacaccgccgtcctgaccgccgtttacgcgctggcaaaccttgccgccgccgcctttttgctgtttcaaaaccgatgccgtctgaaggccgtccggcacgcaccgttttcgcccgccgtcctgcaccgggggctgcgctacggcataccgatcgcactgagcagcatcgcctattgggggctggcatccgccgaccgtttgttcctgaaaaaatatgccggcctggaacagctcggcgtttattcgatgggtatttcgttcggcggggcggcattattgttccaaagcatcttttcaacggtctggacaccgtatattttccgcgcaatcgaagaaaacgccccgcccgcccgcctctcggcaacggcagaatccgccgccgccctgcttgcctccgccctctgcctgaccggcattttctcgccccttgcctccctcctgctgccggaaaactacgccgccgtccggtttatcgtcgtatcgtgtatgctgccgccgctgttttgcacgctggcggaaatcagcggcatcggtttgaacgtcgtccgcaaaacgcgcccgatcgcgctcgccaccttgggcgcgctggcggcaaacctgctgctgctggggcttgccgtgccgtccggcggcgcgcgcggcgcggcggttgcctgtgccgcctcattctggctgttttttgccttcaagaccgaaagctcctgccgcctgtggcagccgctcaaacgcctgccgctttatctgcacacattgttctgcctgacctcctcggcggcctacacctgcttcggcacgccggcaaactatcccctgtttgccggcgtatgggcggcatatctggcaggctgcatcctgcgccaccggaaagatttgcacaaactgtttcattatttgaaaaaacaaggtttcccattatgaaaatcgttttgaccacatctatggcaggcttgggcggcacgggcacgatatcatcgattgccaaatggcgtgcaaaaacgaccccgttcagtccgacgaaatcgtccgccgcttcaggcgcgacatttcctatcggaaaatcgtcaacctgattgaaagattggcaaatgagtaaattcttcaaacgcctgtttgacattgttgcctccgcctcgggactgattttcctctcgccagtatttttgattttgatatacctcatccgcaagaatctaggttcgcccgtcttcttctttcaggaacgccccggaaaggacggaaaaccttttaaaatggtcaaattccgttccatgcgcgacgcgcttgattcagacggcattccgctgcccgacggagaacgcctgacaccgttcggcaaaaaactgcgtgccgccagtttggacgaactgcctgaattatggaatatcttaaaaggcgagatgagcctggtcggcccccgcccgctgctgatgcaatatctgccgctgtacgacaacttccaaaaccgccgccacgaaatgaaacccggcattaccggctgggcgcaggtcaacgggcgcaacgcgctttcgtgggacgaaaaattcgcctgcgatgtttggtatatcgaccacttcagcctgtgcctcgacatcaaaatcctactgctgacggttaaaaaagtattaatcaaggaagggatttccgcacagggcgaagccaccatgccccctttcacaggaaaacgcaaactcgccgtcgtcggtgcgggcggacacggaaaagtcgttgccgaccttgccgccgcactcggccggtacagggaaatcgtttttctggacgaccgcgcacaaggcagcgtcaacggcttttccgtcatcggcacgacgctgctgcttgaaaacagtttatcgcccgaacaatacgacgtcgccgtcgccgtcggcaacaaccgcatccgccgccaaatcgccgaaaaagccgccgcgctcggcttcgccctgcccgttctggttcatccggacgcgaccgtctcgccttctgcaacagtcggacaaggcagcgtcgttatggcgaaagccgtcgtacaggcaggcagcgtattgaaagacggcgtgattgtgaacactgccgccaccgtcgatcacgactgcctgcttaacgctttcgtccacatcagcccaggcgcgcacctgtcgggcaacacgcatatcggcgaagaaagctggataggcacgggcgcgtgcagccgccagcagatccgtatcggcagccgcgcaaccattggagcgggcgcagtcgtcgtacgcgacgtttcagacggcatgaccgtcgcgggcaatccggcaaagccgctgccgcgcaaaaaccccgagacctcgacagcataagcgattaaaatacacccccgtacagaccgattttgacaacacctgcggcgcgcgcccgattcttcggaacacgccccccttcagacggcatagggtcggaaatgccgtctgaaaaccgacggacaaaccatcatgctgaacactttcctttccccgtggccctgcttcacccaagaagaagccgatgccgtttccaaagtcctgctgtccaacaaagtcaactactggacgggcaacgaatgccgcgaatttgaaaaagaatttgccgcctttgccggcacgcggtacgccgtcgcccttgccaacggcacgctggcactcgatgtcgcgctcaaagcaatgggcataggcgcgggcgacgatgtgattgttacctcgcgcaccttcctcgcttccgcgtcctgcattgtgaacgcgggcgcaaaccccgtgtttgccgatgtggatttgaacagccaaaacatcagcgcggaaaccgtcaaagccgcgctgacaccgactaccaaagccgtcatcgtcgtccacctcgccggtatgcccgccgaaatggacggcattatggctttggcaaaagaacataatctttgggtaatcgaagactgcgcccaagcgcacggcgcaaaatacaaaggcaaatccgtcggctctatcggacacgtcggcgcgtggtcgttctgccaagacaaaatcatgaccaccggcggcgaaggcggtatggttacgaccaacgacaaaaccctgtgggaaaaaatgtggtcgtacaaagaccacggcaaaagctacgatgccgtgtacaaccacgaacacgcgcccggtttccgctggctgcacgaaagtttcggcacaaactggcgtatgatggaaatgcaggcggtcatcggacgcatccagctcaaacgcctgcccgaatggacggcgcgccgccgagaaaacgccgccaagctggcggaaagtttgggcaaattcagcagcatccgcttggttgaagtcgccgactacatcggacacgcgcaatataagttctacgccttcgtcaaacccgaacacctcaaagacggctggacgcgcgaccgcatcgtcggcgaactgaacgcgcgcaaagtcccctgctatcaaggcagctgctccgaagtctatttggaaaaagccttcgacaacacgccgtggcgaccgaaagagcgtttgacaaatgctgtcgagttgggcgacaccagcctgatgttcttggtgcacccgacgctgaccgacgacgaaattgcgttttgcaaaaaacacatcgaagccgtcttgaccgaagccgcacgataacccttcagacggcatatgccgcctgaaaacacataccgccccacgatatgaatctggaaactctgatcgccctgccgcgcaacatcaagaaaatctgtttcctcatacacgattttctgatgattttcattgccttttggttcacccaaagcctaaaggccgactactcggacgaatggttcgattttgccaactggcagtcttttttgctgactgccttgctgaccatcacattatttatccgaatggggctttaccacgccgttacacgcttcgtcagcttccgcatcctcaccaccgcactggcgggcagcctcgcctccgccgtgttgtttttcctcaatacgctgatatttgaagaaaggctgcgcctcgccctgccgattgtctatttcttactgctgtttgtttccgtgaccggctcgcgtatggttttgcgcggactgttgtccgaacaccccaaaaaacagatgatccctgtcatcatttacggcgcgggacggtcgggcagacaactgcttgaggccgtcaaacaaatgcgcgaatattccgccgccgcctttgtagacgacgaccccaaactgtggcacaccgtcatctacgaccttgccgtttaccagcccgatgccatcgccttcctcatcgaacgctacggcgtggaaaaaatcctgctcgccatccccggcgcgacccaggaacaacgccgccgaatcatcaacaaactggaagcctatccgtgcgaagtgttgaccattcccggaatgaaagacctgatggacggaaaaatcagcatcggcacgctcaaaaaaatctctgtgtccgacctgctcgggcgtgattccgtcgcgcccgacgaccgcctgatgagtgccgacatcgaaggcaaaaccgtcatggtaaccggcgcgggcggctccatcggttcggaactctgccgccagattatccgccgccgccccgaaaagctgctgctgttcgagttatccgaattcgccctgtacgccatcgaaaaagaattgcgcgaaacctgcatccaaaaacgcctcgacaccgaaatcctgccctttctcggttcggtgcaaaaccgcacgctgctcgaacacgtcatgaccgccttttccgttgcgaccgtctatcacgccgctgcctacaaacacgtccccatggtcgagttcaacaccgtcgaaggcatacgcaacaacatcttcggcacactcgagtgcgcgcttgccgccacgacatcgggcgtaagaactttcgtcctcatctccaccgacaaagccgtccgccccaccaacaccatgggtgccagcaaacgcatggcggaactctgccttcaggcactcgccgccgaacccggacaaaaaacccgcttcagcatggtacgtttcggcaatgttttaggttcgtccggctccgttgtcccgctgtttgaaaaacagattgcagaaggcggcccgcttaccctgacccaccccgaaatcacacgttatttcatgaccatacccgaagccgcccaactcgtcatacaggcaggcgcgatgggtacgggcggcgacgtattcgtcctcgacatgggtgaatccgtcaaaatcatcgaccttgcccgccaaatgattaccctaagcggcctcaaacccaacacacccgaacaacccgacggcgacatcgaaatcctcattaccggactgcgtcccggagaaaaactctacgaagagctgctcatcggcgacaacgtccgcaaaaccggccatccgcgcatcatgaccgccaacgagaccatgctgccgtggcacgagctctccgccctgctcgaccgcatccgtgcggcctgcgaccgttacgaccagcaggcaatccgcaccctgctcatcaacgccccgaccggctttgccccgagcgacggcatctgcgacctgctttgggtacgagaaacacacagaaaaaatgccgtctgaaccttcagacggcataacgtacaaaccaacctaccttacacacacggagtttgacatgcagttctcagcattcggcgaaaaattcacgcaacacagcggcatcctccaactgatggacgacctcggcgacgcgctcaaaagcgacaagcccgtcaacatgctcggcggcggcaacccggcgcgcattccggaaatcgatcaggcgttcgccgacatattctccaaactggcggcagaacacgccgtcgaaaacatcggcaactactccaatccccaaggcgatgccgtgctgattgacgcgctgaccgccttcctcaaccgcgaatacagctggaatctgaccgccgacaatatcgcgctgaccaacggttcgcaaaacgcgtttttctatcttttcaacctcttcggcggcaaattcaacctttcagacggcacatccgcagaaaaagccattttgttgccgctcgcgcccgaatacatcggctatgccgacgtgcatgtcgaagggcagcacttcgtttccgtcaagcccaaaatcgaaaacgtcgaacacgaaggcgaagccggcttcttcaaataccgcgtggactttgacgcactggaaaacctgcccgaactcaaagcgggcaaaatcggcgcgatttgctgttcgcgcccgaccaacccgaccggcaatgtgttgaccgacggcgaaatggcgcgtttggacgctttggcgcgtgaacacggcattccgctgattatcgacaacgcctacggaatgccgttccccaacatcatttacagcgacgtaacgctgaattggcacgaaaacatcatcctctgcttcagcctgtccaaagtcggcctgccgggcgtgcgcaccggcatcatcgtcgccgcgcccgaagtcgtcaaagccgtcagcagcctgaacgcgattgtgaaccttgcccccacgcgcttcggcgcggccatcgcaacgccgctgctggaaagcggcgagatgaaacggcttgccgaccaagtcatccggccgttttaccgcaatcaggcgcaaaccgccgtctcgctgctcaagcgggagctgggcgcgtacccgatgaaaatccacaaacccgaaggcgcgattttcctgtggctctggtttgaaaacctgcccgtttcttcgcaaaccctgtacgaaatgctcaaagccgaaggcacactgattattccgggcgaacatttcttcgtcggcatcgacacgcaggattacccgcatgcgggcgagtgcatccgcatgagcatcgcgcaggacgctcaaacgctggaaaaaggcattgccgccatcggtaaaaccgtccgaaaactgtacgacaacgtttaaaacgcaaaaaatgccgtctgaaaagttttcagacggcatttttatctgcattcaatatcgggaaaaatgttcccaaaccggtttgcagttttccggcagctcgggacacgcgccgaggatgccgccgctgaagtcgtttaagcggtggaagtcgctgcccgcgctggcgagcataccgaagcgttctgccaaaagcgcgtagttgaggcggtcgtttttgcagcagtttccgctgtggacttcgatgcctgcgccgccgaggtttttaaattcttcaaacaaattgcgcttggcggtggcggacaaatcgtagcgcatggggtgggcgatgactgccatgccgcccgctccgttgacggcggagacgcagtcttccagcgtcgcccattcgtggcggacggcgcaggatttgccgtcgcccaagtatttggtgaacgcctgctgcttgtttttgacgtgtcccgcttggatgaggaactcggcgacgtgggtgcggctgaccatttctttgtttgccgccagtgccagcgcgccgtcgtatgcgccgccgatgcctttcttttcgagcttggcggcgatggcttcaagacgtttcagacggcctttccgcacttgcgccaacaggttttgcaggttttcgtcctgctcgtcgaaatccaaaccgacaacgtgtatggtgcgcccgcgccacgttacggagatttccacaccgttaatcaggcgcaaaccgagcttgtcggcttcggcgcgcgcttcggcgatgccgccggtgtggtcgtggtcggtcaacgccagcagcgtgcagccgttttgatgcgcgaggcgcacgacttcggcgggggagagcataccgtcggaaacggtggaatggcagtgcaggtctatcatggggtgttatgtgtgttgtgaatgaaggtcgggggttaatattatcggttggtgtggatacagcggtgatttcaacaaacaggtgtatggcaaatgcaaaggaaaagtccctatgccgtcattcccgcgcaggcgggaatccagaccttgatttgtcaaaaatatttaaggttaaccgctatttcgaacttccggattcccgcctgcgcgggaatgacgatatggacgttttcagttttaatctactataaaagactgtctgaaaacgtggttttatagtgaattaaatttaaaccggtacagcgttggctcgccttggctcaaagagaacgattctctaaggtgctgaagcaccaagtgaatcggttccgtactatttgtactgtctgcggctcgccgccttgtcctgatttttgttaattcactatatcaagccgaaccgtttcagacggcatcgtccgaccaacccgcttctttcaatttctgccgttgcacgtcgtatttggctttatccgcccagtaaatcgtctgaatgcacgcctcgccgcagtcgctgccgcagcattcccacgactcgggtcggacgggttcgtctaaaagcggctcgcccaaaagggcttcggctttatacttcagggtcgtatccatcggcgatttccaagcgagcgccgtcaaactcgatgacttcgccgccgcgtattttggcggttttacgggtttcggtttcgccgttgcgcaacaccagcccttcggcgataaacgctttcgcctgtccgccgctttcggcaagtccgaccaatttcaagaggtcgcacaaggcgatgtattcgttgtcttcgagatagacagtggcttccataatgttcccttgcagaaagaggccgttattgtagcacctgccgccgccgtacccaaaattaccgaaaaaccggcgatgtatccgcaccgcctgttccgtaaaagtaaaaatgccgtctgaaaccccatatgccgccatccgttcaaagaaatcctgcccaacggcagactgcaaatcctgttccccgacgaatccgcattgacgctgatgcacatcctcaaacgcgaactgcccgatacaccggcaatcggcatcaaaacgaaatcaaaaacctgtttgaacgtaaaattaatttaactgcttgccatccgtccgaataaggcatatagttctttataactagtttgatagtcctttatatctatcaatactccttgggaagcctccgccatacggcaggaggcatttttttgccgtagtaaaagctcaaaaacatttgcaggtcatgccgtctgaacccgaaacggcattacctacaccgccatctaaagacaaccctgctacaatacgccttttattgtccacgccgattttgccatgaccgagccgacctacattcccctgcgcctgcataccgaattttcgattaccgacggtatggtgcggattaaaaaactgattgccaaagcgcaggaatacggtttgcctgctttgggcatcagcgatttgatgaacgaattcggtttggtgaaattttataaagcctgccgcagcgcggggattaagcctatcggcgcggcggatgtgcggataggcaatccggatgcgcccgacaagccgttccgcgctatgctgattatccgtaacgatgcgggctatctgcgcttgagcgagcttctgacggcggcttatgtcggcaaagaccgcaatgtccatcatgcggaactcaatcccgaatggctggaaaacggcgacaacagcggcttgatttgtttgagcggcgcacattacggcgaagtgggcgtgaatctgttgaacggcaatgaagacgcggcgcgtacggcggcgttgaagtatgcggcgtggttccccgatgcgttctatatggagctgcaacgcctacccgaacgccccgaatgggaggcttgcgtttcgggcagcgtgaagctggcggaggaattgggtttgccggtggtggcgacgcatccgacacagtttatgagccgcgacgatttcaacgcgcacgaggcgcgagtgtgtatcgcaggcggctgggtattgacggacaagaaacgtccgcgcgatttcacgccgggccagtttttcattccgccggaaaccatggccgaacgtttcgccgatttgcctgaagccttggaaaacacggtagaaattgccaaacgctgcaacctgcacatcacattgggcaaaaacttcctgccccttttccccacgcccgacggtttatcactcgatgactatctcatcaaactctccaacgagggtttgcaggaacgtatggttcagctttatcccgacgaggcggagcgggcggcaaaaatgccggaatatcaggaacgtttggattttgagctgaacatcatcatccaaatgaaattccccggctatttccttatcgtacaagactttatcaactgggcgaaaacacacggctgtccggtcgggccgggccgtggttcgggcgcgggttcgctggtggcgtattcattgaagattaccgaccttgatccgctcaaatacgcgctgctgttcgagcgtttcctaaaccccgaacgcgtttctatgcccgacttcgacgtggacttttgccaaagcaaccgcggccgcgtgattgaatatgtgcgcgagaaatacggcgcggaggcggtcagccagattgttaccttcggcacgatgtcgtccaaagcggtcatccgcgacgtcgggcgcgtgttagagctgccgtttatgctgtgcgacaaactgtccaagctgattccgttggaagccaacaaacccctgagtttggaaaaagccatggagaccgagccacagattcaggaattaatcgaagcggaagaagcggacgaactgattacgctggcgaaaaagctggaagatttaacgcgcggtttgggtatgcacgcaggcggcgtgttgattgcgccgggcaagatttccgattacagccccgtgtatcaggcggacgaatccgcctcgcccgtatccatgtacgacaagggcgacgtggaagatgtgggtttggtgaaattcgactttttgggtctgcgcaacctgaccattatcgaaatggcgcagaacaacatcaaaaacactaccggcgacatcatcgatgtcggcaaaatcccgcttgacgaccaggtcgcctaccaaatcttccgcgatgcgaacaccaccgccgtcttccagtttgagtcgaccggcatgaaaaaaatgctgaaaacggcgcacacgaccaagtttgaagaactcatcgccttcgtatcgctctaccgccccggcccgatggacaacattcccgacttcgtcgcacgtatgaaggggcaagaattccaatacatccatccgctactcgaaggcatcctcgcgccgacctacgggattatggtgtatcaggaacaagtgatgcaggcggcgcaaattatcggcggctactcgctcggcggcgcggacctgctgcgtcgcgccatgggtaagaaaaaacccgaagaaatggtgaaacaccgcgaaatcttcgccgaaggcgcggcaaaacaaggcatttcgcgcgaaaaatccgacgaaatcttcaactacatggaaaaattcgccggctacggtttcaacaaatcccacgccgccgcctacgccctgatttcctaccagaccgcatggcttaaagcgcactaccccgccgaatttatggcggcgaccatgtcgtccgaattggacaacaccgaccagctcaagcatttctacgacgactgccgcgccaacggcattgagttcctgccgcccgacatcaacgaatccgactaccgcttcacgccgtatccggacatgaaaatccgctacgcgctcggcgcgattaaaggcacgggcgaagccgccgtcgaatccatcaccgccgcgcggcaaagcggcggcaagtttaccggtctgttggacttctgcgagcgcgtcggcaaagaacacatgaaccgccgcaccctcgaggccctgatacgcggcggcgcgttcgacagcatcgaacccaaccgcgccatgctcttggcgaacatcgacctcgctatggacaacgccgaccaaaaagccgccaacgccaatcagggcgggcttttcgacatgatggaagacgccatcgaaccggtgcggctcatcgacgcgccgatgtggagcgaatcggaaaaactcgccgaagaaaaaaccgtcatcggcttttacctgtccggccacccgttcggcccgtatgcccaagaagtccgccaaatcgcaccgaccaaattagaccgtctgaagccgcaagacagcgtgcgcctcgccggattcgttaccgccgtgcgtacgatgatgggcaaacgcggcaaaatcgccttcgtcagcctcgaagatttgagcggacaggttgaaatcatggtcggcggtcagacgttggaaaactgcgccgactgcctcaaagccgaccaagtgctgattatcgaatccaaagtcagccgcgacgactacggcggcggcgacgggctgcgtattctggcaaaccaagtcatgaccctgcaaacggcgcgcgaacgctacgcccgcagcctcagcctcgccctcgccccgcatcacgacatcggcggactggtacggctgctcgccgcccaccaactgcccgacacgccgcgcatcccgctgcaactgtcgtatgccaacgaaaaagcgtcgggcaggcttcaagtgccgccgaaatggacggttacaccgagctccgcattgttcggcgaactggaaacattgctcggcagccggtcggtgcgcgtcaactggtaacccaaaatataaatgccgtctgaagcccaaaaaccggtttcattcgtactttattcgaatgattgaataaaagtaactgccaagaaaaacgtattttttggttatttcgccagtctaaatagagcaaccgggacgattgatatccgtgtgcatgacacagacagcaccaaagggaaaaacggcattttccaaagtatcggtatcaaaaccgccctttcactccaaaaataccaaatcgacaaaccgggcaaagaaatcagaccgtgccgcctgaaaaaacgcccacccgtccgttaaattaacctatccctgtttcagacggcctgaagcagggatttttatatcaaaataaaatgagaaagggagcaataacccttaggtagctcttgttattttccgatgcaaaacaaagcagtcatatatttaattccccctacctctgccaagccttcctcaaatattcgacgcaatcggtcagcgagtagaacgggacattgccgtggtcggcattcggatattcccggaaaaagacggcggccccgtgcctgtctaactctgccgccatttgttcggcctgccctgccatatcgcgttcttccctgcgtttacaatcgctaccccgttctagcgcgccgatgttgaggcagacatcgatgccgtttagccggttttcagacggcataaagtcgagtatccgcctgttgtgccaccaaatcgatggggatacgagccaatgccgtctgaaacggcggtgggaaagcagggaatacagtccgaacagtgcgccgaacgagtgtccgaatacggcggtttcattgcggttgagggtgtagcggctttctaaaaaggcggtcagctcgctgtcgataaaggcggcgaagcggtctgcctgtccgaactgctgccgttcgtctgctgtggcgttgtctccaagcggcggcgtgtagtcggcggcacgttgtgccaaatcgcgcacactgcctgtcgtgtagccgataccgacaatcaggcagggggcgttgcttcgggtaacggggttgttcatcagcgactgcatgatgttgaaaagtgcggggaaaaaggcttcgccgtcgaggacaaagaggacgggatagccttcagacggtatttcgccgagtgttgccgtctgaatccgatagattcgccccgtgcaggtggatttgatttcggtttcaaaggcttggggcagtatggcaggttggaatgtgtcggtcggtatgggtttcatgatgttcggcttgtgggtcagactggcggcaagcggtaaaaccgaaccggcaaagcggtctgcctgccggttcggtctattttccttcgcaatgccatactccagttgtgagagcatagggtatgccgcgcagcttgttgtagtttgatgatgctgcggctgccgtttcagacggcatattggtctttaaaaactgtaacgcaggtttgccgtcaggctgcgctccgaaccgggaatgttaaaggtgctctcgctgccgacgcgggcgtagtaatggcggttgaagatgttgtcggcgttgatttgcagcttcagtttgggcgtgaagcggtatgccgccatcgcatcgaacgtggcataaccgcctgcatgtatccctgcagatgaagtaatgccgctcatcgcgttcacgccgccgccgatggtcagcccggacgtaacttggtaagtcgtccacaggtttgcgctgtgtttgggcatcagcaggaagatgccttcgtcgcgcgaattggaggcggttttgatttggctgtgcaggtagctgtaacctgcatggatttgccatttcggtgtcatcgcgccgctgatttcggtctcaacaccttccatcacgcgtttgcccaatgcggcgtaacgggtttttttgttgtttgagtccagcggtgcggcggcgtttttatccttcatgcggtagaacgaaacccgggtattgaggcggtcgtccatgtagctgcctttgtagccgatttcaaactggttgccttcgcgcggtttgagcagcttgccgtcggtgccgatgctggtttgcggtgtgtagagttgggaggcggaagcgtacaggctgttgctgccgtctatatcgtaaaccgcgccggcgtagcttgtaaatttggttttcgaagctttatgcagggttttgccgtcgcccgactcgattttgtgatgtcctacacgtccgcctgcaatcaacgacaaaccttccagaggacggaacaccgtcttggcatacaaaccggtttcgtcgaggttttcttcggtaacggagtgattgaaacctttgtttccggcgcgggcgttctgaagtatgccgttataaggcaaagcgcggaaaccatctaaagcgacgctttttgacaaagtcgaacgcccttgttcattagtactgcgcaagcggttgtagtctgcaccaatcacaaattcgttggcggtgttgcccaaggcaaacggacggctgtaacttgcgtcaaccgcaaaggctttttgtttaatgtccgtacccaaacccgctacgtcggcttgtccggtattgttgagtttgctgcccgcaaacgtataattggaatcggctttccgatcggaatagcgcataccgactttgccgtagccgccgttgccgaagtaatgtttcaaatcggcgaacacgtcgtggctgtgcattttaaatttgttccaatccgcgccgacaaatacgtgttgcggcagggacggtaatttgttattggcatcggcaggcaggccgttgtacggcgcgaggcggcgttgctggtaaagatagcccgcgcccaaaaccgtatcggggttgatgtcccaatccgccgccgcgtagaaggtttcgcgccggttgtttttctcggcgggacgcggagacgcgccgacggtctgcgccatcacgcggccgcgcacgctgccgtctgaattgaggctgcccgatacgtccgcctcggctttatattgtttgtgcgtaccgaaccctgccgccgcatgaccttggaacgctttggtcgggcgtttgcgcaccagattcacgatgccgcccatctcgccgctgctgtcgaacagtccgctcggcccgcgcatcacttccacgcggtcgaaggcgaacaggttgggcagcgtgccgttgatactctgcatctgcgcgggcaggccgtcgatgttgtattcgctgtattcgtaaccgcgcgcgtaaaccgaagagcgtccgtcgtcgttgctcaacacgcgcaggccgggcgttttgcgtgccaactggtcaaacgtatcaacattgcggtctttgacctgctggttggtaatgatgctgacggattgcggaatttcgcgcaaagaagcggggatttttgtaccgacggtggcggcaaacgagctgtaatcgccgtttttctcggtggcaatcgcgttgtaagaacgctgacccttaatatggacggtttccaaaccttccgtttgtgcggcaaaaaccgaagacgagagtgctgccaaaaccgtggcggcggtcatattgatgcggaaaactgacataaactgtcccattcacataaatgataatggttctattttaataaagcgcaacgcggcttgttcggaaaaacatatcgcgcagccgacaaattttgtcgaaaatgcgacacgtctgcgttttccgcataaaatttgcttttttactgcaaccaacctgctatgaccacgcccaaactcatcatcttcgactgggacggcacgcttgccgatacgacccaacccatcatcgacaccatgcgccgcagcttcgccgaatgcggttttccgccgcccgaagcggaacgcgtccgcagcctgattggctacagcctgcccgaaatcatccgcaccctgctcgaaatgccgtctgaaaccgccgttgccgacatcacacgcacttattccgcacattacctcaatcccaacaaccgcaatatgtccttatttcccgatgccctgccctgtctggacaagctcaaagcacaaggatactggcttgccgtcgccacgggcaaagggcgggcgggtttggacaacgccatcagtcaaaccgccaccggcggctattggctcgccaccgcctgcgcgggggaatatccctccaaaccctcgcccgaaatggtattcggaatctgcggcgaactgggactcgacccgaaagaggcattggtcgtcggcgatacggcgcacgacctgcatatggcggcaaacgcaggcgcggcggcagtcggcgtggccaccggcgcacattcgcgcgaacagctccttagcgcaccgcatctcgccgtattggacggtttgtccgaactgcccggttttcttgcacaacattacgcctgattggtttccgcatccggcacacggcaaaaatgccgtctgaagcctgttcagacggcatttgtgttgcccaaacattcaacgcctgcgtcaacgtttgcacaaatcgggtttggtttcgccctcgcggcgcaactctttgggcaggacgaacacaatgctttcttccgcaccctcgccttcgcgtacggtttcgtgcccccatccgcgtatggttgccagtacttcccgcaccaacacttcgggcgcggacgcgcctgccgttacgccgactttgtttttgccctcaaaccatgcgcgttgcaggtagcctgcattatccaccatatacgcatcgattccgcgcgatgccgccacttcgcgcaagcggttgctgttggacgaattgggcgaaccgaccacaatcacgatgtcgcactgttctgccaactctttgacggcggtttgccggttggtcgtcgcatagcagatatcttccttgtgcggattgcggatattggggaaacgcgcgttcagcgcggcgatgatgtctttggtttcatcgaccgagagcgtggtttggctgacataggcgagtttgtcggggtttctgacttcgagttttgccacatctccgaccgtttcgaccaaaagcattttgcccggcgcaagctgccccatcgttccttcgacctcgacgtgccccttatgcccgatcatgatgatttcacagtcttgggcatccagtcgggcgacttccttatgcactttcgtcaccagcgggcaagtcgcatcaaacacgcggaaaccgcgctccgccgcttcttgccgcaccgccttcgatacgccgtgtgccgaataaaccagtgtcgcgcccggcggcacttccgccaagtcttcaataaacaccgcacctttttcacgcaggttgtccacgacgaatttgttgtgaacgacttcgtggcgcacataaatcggcgcgccgaactcttccaaagcacgttcgacaatactgattgcccgatccacaccagcgcagaagccgcgcggattggcaaggatgatggttttctcgttcataagcccggtatttcgttttcagacggcatcaatatttttcttcttgggttttacggtggacgatgttgtccaacaccgccaacaccgcaccgacgcagataaagctgtcggcaatattaaaggcgggataaaaccaattttgccaataaaacaataagaaatcgacgacatgaccgtgtatcaggcggtcgatgacattgcctaacgcaccgccgataatcattgccgcacccgttttgccgagggttgcaaactcatcgcgcaagatggcgcgtaccaaatacgcgctcaccgccaccgccagcaccaaaaaaaagtatttttgccagccgccctgatcggcaaggaagctgaacgccgcacccgggttgtacaccagcgtcagatcgaaaaaggaaggaatgacattgacgcgttcccgatactgaaacgacgacagcaccgcccacttcgaccactggtccagcacgatggcggcaagtgccaatacccaatagcgcgttttacttgaaacagatgaagacatatttttcaacagccggtaaaagagtaccattttacccgaaaaccccctttcctgtacccgaaacggcaaatgccgtaatcttaaaacccgtcattcccgacaacaccgtaatctcgaaacccgtcattcccgcgtaggcgggaatccagacctgtccgcacagaaacttatcggataaaaacagttgcccaaaccccgcgttctatagtggattaaattcaaaccagtacggcattgcctcgccttgccgtactatttgtactgtctgcggcttcgttgccttgtcctgatttaaatttaatccactatagattcccacttccgtgggaatgacggttcagttgcattccgacaacaccgtaatcttgaaatccgtcattcccgcgcaggcgggaatctatcggaaatgactgaaacctcgagattctagattcccactttcgtgggaatgacggttcagttgcgttccaacaacaccgcaatctcgaaatccgtcattcccgcgcaggcgggaatccagacctccgacgcggcgggaatctatcggaaatgactgaaacctcgagattctagattcccactttcgtgggaatgacggttcagttgcgttccaacaacaccgcaatctcgaaatccgtcattcccacacaggcgggaatccagacccctgacgcggcgggaatctatcggaaatgactgaaaccccgagattctagattcccactttcgtgggaatgacggttcagttgcgttccgacaacaccgcaatctcgaaatccgtcattcccgcacaggcgggaatccagacccctgacgcggcgggaatctatcggaaatgactgaaaccccgagattctagattcccactttcgtgggaatggcggttcagttgcattccgacaacaccgtaatcttgaaatccgtcattcccgataacagcgcaatcttgaaacccgtcattcccgcgcaggcgggaatccagacctccgacgcggcgggaatctatcggaaatgactgaaaccccgagattctagattcccactttcgtgggaatgacggttcagttgcgttccgacaacaccgtaatctcgaaatccgtcattcccgcacaggcgggaatctatcggaaatgactgaaacctcgagattctagattcccactttcgtgggaatgacggttcagttgcattccgacaacaccgcaatcttgaaacccctccgccgttataaagacaaatcgcggcacaaaaaatgccgtctgaaatgctgttcggcggtttcagacggcatttgctcaaactttatcaggcgtaatggcgcgtttcgccttctccgccgacattctctgcacagcgtttgcagacggtttcatagcctgcaaccgcgcccacatcgcgggtgtagtgccagcagcgttcgcatttttcaccatcactggctttagcggcaacggcaagttcgctgcctactttcacttctgctttagacaccagcaaagcaaagcgcaattcttcgcccaaagcattcagatagccggccatttcttccggcgcggtaatttcggcttcggcttgcaaggacgaaccgacggttttgtcggcgcgcaaaggctcgatggcggcggttaccgcttcgcgggcttcgcggattgccgtccattttttcaccagttcggcttcggttttttcgttgatggtcgggaactcgtgccaagtatggaagaggacgctgtcttcttcgccgccgccgatgatgtcccacgcttcttcgccggtgaagcacaaaatcggtgcaatcaagagaaccaaactgcgtgtgatgtgatacagggcagtttgtgcgctgcggcgtgcatggctgtctgctttggtggtgtagaggcggtctttcaggatgtcgaggtagaacgcacccaagtcttccgagcagaaagaaacaatgtcttttacggcaaagtggaaggcataacgcggatagtaatcgcctgccagacactcttgcagctgacgtgccaataccacggcgtagcggtcgatttccaccatatccgcctgttgcacggcatcttcaatcggattaaagtcgctcaagttggcaaacaaaaagctcaaggtattgcggatacggcggtagctttcggttacgcgtttgaggatttctttggaaatcgccaattcgccgctgtaatcggtagatgccgcccacaggcgcaggatgtctgcgccgaattcgttataaacctcttgcggtgcaacgacgttgccgatggatttcgacatttttttgccttcgccgtcgacaacgaaaccatgggtcagcagctgtttatacggcgcgcgacccattgatgaggcgcagccggtcagcatggacgattgaaaccagccgcggtgttggtcgctgccttcgagatacaaatcagccggccattccaattcttcgcgttgtttcacaacggaataatgggtcgagccggagtcgaaccatacgtccattgtgtcagaaagtttatcgtaattttcgcaatcttccgcgctcaagagttcgctcttatcgagggagaaccacgcttcgatgcctttttcttcgattttcagggcaactttttccaaaagttcggcagagttcggatgcagctcgcccgtttctttgtgaacaaagaaagtcatcggcgtgccccaatagcgttggcgtgaaaccacccagtcaggacgaccttcaatcatggcttccaaacgcgcgcgaccccaagacgggaagaattcggtgtcgtccacggccttgatggctttgtcgcgcagggttttgccgtcggcaccggctttgtccataccgacaaaccattgacctgtcgcgcggtaaatcagcggcgttttgtgccgccagcagtgggcgtagctgtgttcgattttactgcttgccaaaaggttgccggtttcttccaaccattgcaggatgacggggttcgcctcccaaacgcgcataccggcgacacgcggcgtttcgccgatgtatcggccttcggcgttgacggggttgtaaagctcgatgccgtatttattgcagacggcgtagtcttccaaaccgtgcgcgggggcggtgtgtaccaagccggtaccggcatcggtggtaacgtgttcgccgttgagcatgggaatatcgcgttcgaggaacggatggttcatgtgcagattttccagcttgtcgccggtggtttcggcgagaatagcaatgccgtctgaaaaaccgtaacgtttgagcgcgtcttctgccaaatctttcgccaataccaatttgcctttcggcgtatcaatcagttgatacaccacgtctgcacccgcagacacggcttggctcgccggtagcgtccaaggcgtagtcgtccaaatgacggcaaacgctttgccttcgaaaccagccaaaccgaatgcggcggcaagcgcggcagtgtctttaaacagataggcaacgtcaatcgcgggcgagattttgtctttgtattccacttccgcttcggccagcgaagaaccgcagtccaagcagaattgaaccggtttcgcaccccggtagagatagccggatttgtagatttcgccgagcatacgcacggtatcggcttcggttttgaaatccatagtcaggtaaggatggtcccagtcgcccaacacgcccaagcggataaagtcttttttctgacgggcaatctgttcggcggcgtattcgcggcacaattcgcggaaacgtgctttgggcatatctttgccgtgcagtttttctaccatcacttcgatgggcaggccgtggcagtcccaacccggcacataaggcgcgtcaaaaccggcttgggttttgctgcggataatgatgtctttgagaattttattgacggcatgaccgatgtggatgtcgccgttggcatacggcgggccgtcgtgcagaataaatttcggacggcctttggcgatttcgcgcagtttttggtagcgtttttgctcgtaccagcttttcagccatgcaggctcgcgcttggcaagattgccgcgcatcggaaacgggctctcgagcaggtttacggttttactgtaatcggtcattttttaatctctattgttacaatatttcggtctcagacggcattgcgccccaaacagcatttcacaacgggaaaaccctgtgccgtctgaacagttaaaagattgattgtagcccaatcggatggtttgtataaggtttttctaccaacgccttgcggcttccatatcggcttcaatctgccttttcagttcttccataccgtcaaacttttcctcatcgcgcagtttgtgcaggaagcggacgttcagcccttgtccgtacaggtcgccttgaaagtcgaacaggtggacttcaagcttttgagaacagccgctatcaacggtgggattgaagccgaaactcgccacgccgcgccgcgtgccgaatgcgccgtctgcttcgacgacaaacacgccgccgagtgcataacggtggcggggcaggcggatgttggcagtcggggcgtttaaggtgcgtccgagttttctgccgtgcaccaccctgccgctcaagacgtagtcgtgtcccaaaagttttttcgcataggcaaggttgccgtctgaaagggcttgtcgcacggcggtactgctggtgcggatgtcttcgacgatgacggaaggcgtacgctcggtctgcatatcgggctgttgtgccaaaagttcaaaacagccttcccgccccgcaccgaaacggaaatcatcgccgacgagcaaataacgcgtattcaaggtttgacgcagcaggcggtcgataaacccttgcgcggatatttcggaaaaattttgatcgaaacgcaaaacccagacggcatcgacacagcctgtgccttccaataattcgagcttggtgcgcagggggctgatccgacacggtggcatcctgccggtgcggagtgcgaaaaattctttgggttggggttcgaaaacgacggtcacgacgggcagtccgcgcgcgtcggcttcgaggcggagtttttggaggatgtgtttgtgtccgaggtgtacgccgtcgaaattgcctatggttacggcggcaccctgtggaaagtcgggcgcgttgtgccgccccagcctgattctcattgttgcattcgggtatgtggtgaaacaggcggtcattgtaaacggtattgcggtttatagacagtgtgccgcccgttacgcccgcccgacgcgggaaaagtaggcaaatttcccgccgccgaacgcgccaaacgcacaaaaacgcgcagcaggcgcggtgctatgtgttgaaacatcgccccaaacctgatgcaacatcagtgaaaatcgttcttttttaaccaggtaaaccgagacaaacaaccctccgccgtcattcccgcgcaggcgggaatccggacctgtccgcacagaaacttatcggataaaaacagttgctcaaaccccgagattctagattcccactttcgtgggaatgacggttcagttgcgttccgacaacaccgtaatcttgaaactcgtcattcccgctcaggcgggaatctagaacgtggaatctaagaaaccgttttgcccgataagtttccgtgcggacaggtccggattcccgcctgcgcgggaatgacggcatttctgcggcaatcggattatttccaaaccaaaagcgcgtggttgcgtttgccgcgccgaaggatagtgtatttgccgaaacgtttgtgttcgccgttcagcaggcaggcatcgtcggggcgttcggcggcgtggttggggttgttggcttcggcaggtttgccgttgagcaaaaccgctttgctgttcacaaagccgcgcgcttctttattggaggatgccaaaccggtttttaccaaggcttcgacgacattgatgccgtctgaaacttcaaatgcaggcaggccgtcgagggcgagctgctcgaagtcgctttcggtcaggctgctttggtcttcggcaaacaggctttcggaaatgcgttgcgcggcggcaagggcttcttcgccgtgaatcaggcgggtcatttcttcggcgaggatgcgttgcgcttcgggcttgctgccgcttgccttgtctttggcttcgatggcatcgatttcttcgatggacaggaaggtaaagtatttcaggaatttatacacatcggcatcggcgactttcagccagaattggtagaactgatagggcgaggtttttttcgcgttcagccataccgcgccgccttcggttttgccgaatttggtaccgtctgatttggttaccaaaggcagggtcagaccgaatacttgtttttggtgcaggcggcgggtcaggtcgataccggcggtgatattgccccattggtcggagccgccgatttccaaaaccgcgccgtggcgtttgttcaactcggcgaagtcgtaaccttgcagcagggaataggcgaactcggtgaaggaaatgcctgcgccgtcgcggtcgatgcgctgtttgacggattctttgttcagcatggcgttgacggagaaatgcttgccgatgtcgcgcaggaagtcaaggcagttcatgctgccgaaccagtcggcattgttcgccataatggcggcatttccgccttcaaagctcaagaaaggggttaattggttgcggatactttccacccagccggcaacagtttcggcggaattcaagctgcgttcggcggctttgaagctggggtcgccgatcataccggtcgcgccgcccaccaaagcaatcggcgtatgccccgcctgttggaagcggcgcaatgccaatacgggcagcaggtgtccgatgtgcaggctgtcggcggtcgggtcgaagccgcaataaagggcaattttttgttcgttcaacaaagcgtctaaggcttcgatgtcggtggtttgcgcgataaggccgcgcgattgcaggtcttggatgacgctcatcggtctctttcaaaaaaaattagcgtttttgcaaaccgccgattgtaacaaatttaagcgaatcaatggttatggcgcgtatcgagaaaccgttgtttttcggaaaaacgctttgccaattccgtgccgccgtaagggttgatgtggtctttgtccgagtaaaccggcaatccgccgatttgaaaatctgcggggatataggcggcggcatcaataatatagacgttggggtatttggctgccaattccctgatgcgtgcattggctttcagggtgctttcgtcgtccgggcgcagggcttggcggtaacccggtatgcgtgaagacaagatataggcgcgctggacgttgtaagacgaggcaaggttgtccgccatcaggtaaacggcttgtttttcggacgagagtttatgcagcatacggtcgaatttttggaaaaaaccggcatcataggcaagggagcggctgttttcgggcatttggctgccccagcgcatcgccaaaaccacttttgaataccggggcaggtgttcttcggcatagcgataaacggcgcggcaggctgcccagttttggaacacacgggacgcgtagccttccacataggcgcaagcgtcggcggaaaccatagtggcggaccatttttcttttttgcccacggcatcgaagaatgttttgtaatggtcggcgtgggagtcgcccaaaaccagcagttccggctgtttttccgtatccccccataggcattgtttgccggtattgttgtggcaggaggtgttggaacgcgtcagccccaagcggtcgtattgcgccataaacggcagtctcatcgcaaaaaacgagcccgcccccaaaatgagcataggcaaggcataaatccataaaacggattgtgcgaacgaaccttgccattttttaaacggtttttcgatgcagtggtaagaaaacagggaaagcagcaatatcaggacgaccgccgccgccggcgaataaggcggcaggttgtccgggccgatatagcgcataaaggccaatatcggccaatgccacagataaagcgaataggaaatcaaaccggcggcaacagtgattttcgattggaaaaattttttaagcgggtgttcgtaatgattgaaataaatcagcgcggcaacagccagacagggaatcaaagcggcggggcccgggaaataggcggtttgttccgaataggaaaacaggcaggttgacaatatgcacacggcaaacaatgcgccgacggcggcacagcgtctgccgacggcaggttgccggcagcgcatccacacggcggtcagcgatcctatcagtaattcgcaggcgcgcaggtggggcaggtaatatttatcgagcgcggaaggtataaaggaggcggcaaggcttaaggcacacagtgcggcaaggaagccgaactgtacgcgcaggcttttgcgggcgacaagcagcagcagtatcggaaagacaaagtaaaattgttcttcgaccgacaaagaccagatgtgcagcaggggcttttcttcctgcgcgggatcgaaataatccttcccccttgcaaaatacaggttagaggcgaaacccaaggcggtcagcgcggatttccacaaaagaaagaaatcatctttggtgaataaaaagaagccgcctgccagcgttgccgccaatacggcgaaaaatgcgggcagaatccgcttgatgcggcggatataaaatgccttcagggaaaacctcccccccccccccgacatttcgcggtgaagaatcgtcgtcatcaaaaagcctgaaatcacaaagaatatatcgacaccgagaaacccgcccggcagccaatccttttcgatatggaacacgatgacggacaagacggcggcggcgcgcaatgtgtcgatgtccgggcggtagggtaaggcttggctcataatgtttttatagtggattaacaaaaaccagtacggcgttgcctcgccttgccgtactatctatactgtctgcggtttcgtcgccttgtcctgatttaaagttaatccactatactcgaaacgcggcggcgcaaatgccgtctgaaaggtcatttcgtatcggggatcgggatattcggaatgccggacggcttcccgtaacggcggggcaggcggtttgttttgcaggaatcggggagggcaaatcggaaatgcgggtgggagtttattttgatgcggctgcattccggcggtacgggaaacgccgaaaatcatcaaaatcggcttcagacggcatttccggcaagccgcctgaaacctgccgcatttgggttacacgttaaacaaaaagtgcatcacatcgccgtcttgcacgacatattccttgccttccacacgcattttgccggcttctttggctttggcttcgccgccgagcgagacaaagtcgtcgtaagaaatgacttgggcgcggatgaagccgcgttcaaaatccgtatgaatcacgccggcggcttgcggcgcggtgtcgcctttgtgtatcgtccacgcgcggacttctttcacaccggcggtgaaataggtttgcagccccaagaggtcgtaaccggcacgaatcaggcggttcaggcccggttcttccaagcccatttcggcgaggaactcggctttttcgtcgtcttccaattcggcaatttcgctctccatcgcggcgcaaacggcgacgacgggggcgttttcttttgccgccaattctttcaggcggtcgaggtgcggattgttttcaaaaccgtcttcggcgacgttgcccacatacatcgccggtttggcggtcagcaggaacagcggtttgagcatcgcgcgttcttccgcgtccaaaccgaaggaacgcacgggtttgccttcgtccagatgcggcagcagttttttgcacaaatcgaccagcttttgcgcgtctttgtcgcctgagcgggcgcgtttttcttcgcggacgatggctttttcgacacttgccaggtcggcaagtgccaactctgtgccgatggtttcaatgtcggcaatcggatcgacgcggcctgcaacgtggacgatgttgtcgtcgtcaaagcagcgcacgacattcacaatcgcatcggtttcgcggatgttggcaaggaactggttgcccaagccctcgcctttgctcgcgcctgcaaccaaaccggcaatatcgacaaattcgacgatggcaggctgcattttttgcggattgacgatttttgccaattcggccatacgcggatcggggacttcgacgatgccgacgttgggttcgatggtacagaaaggatagtttgccgcttcgatacccgattgggtcagcgcgttaaaaagggtggatttgccgacgttgggcaaaccgacgatgccgcatttcaaactcatgttttttcctgaaaatagagaaatttaacggcggattatagcataccgccgcccgcgttccgaaaaaatgccgtctgaaacggcttcagacggcatccggtttcagaaaaccgttcagaacaagccgtgaatcacgccttctgcgtccacatcgattttctcggcagccggaactttgggcaggccgggcattttcatcatgttgccgcacagggcgacgatgaaacctgcgcctgcggaaacggtgatgccgcgcacggcgatgcggaagtcttcggggcagcccaacagtttggcgttgtcgctcaaagagtattgggttttcgccatgcagatcggcattttgtccaagcccagtttttccagtgaagcgatttcggcagacgcttccgcgctgaaatcaacatcttccgcgccgtacactttttgggcaatcgcacggattttgtctttgatgcccaactcgacatcgtaggcgaaaccgaagttattggtttgactttcaatggcgttgacgactttgcgcgccaaatccgcgccgcccgcaccacctttgccccacacttcggtcagggaaacttcaacgccgtgttcggcacaggctttttcaatcatcgccaactcggcatcggcgtcggacacgaagcggttgagcgcaacgacgacgggcagtccgaatacgtttttcaggttggaaatgtgtttcagcaggttgggcaaacctttttccaaagcgtctaaattttcttcgccgaggttggcgcgttccacgccgccgttatatttcaacgcgcggacagtcgccacgacaacagccgcatcaggtttcaaaccggcaaggcggcatttgatgtcgcagaatttttccgcgcccaagtccgcgccgaagcctgcttcggttacggcgtaatcggcaaggtgtttcgccagacgggttgcggttacggagttgcagccgtgggcgatgttggcgaacgggccgccgtgtacgaaggcgggcgtgccttcgatggtttgcaccaagttgggcttaatcgcatctttaagcaatgccgccatcgcgccattcgctttcaaatctttggcgtaaacggggctgccgtctttggcgtaggcgacaaggatgttgcccaaacgctctttcaaatcgctgatgtctttggcaagacagaataccgccatcacttcggaagcaacggtaatatcgaaaccgtcaggacgcatcacgccgtcaacgggtttacccatgccgtcgatgatgttgcgcaactggcggtcgttcatatcgaccacgcgccgccacagcacgcgtttggggtcgatgttcaactcgttgccttggtagatatggttgtcgagcatcgcggcaagcagattatttgccgcaccgatggcgtgaaaatctccggtgaagtgcaggttgatgtcttccatcggcaaaacttgggcatagccgccgcctgccgcgccgcctttcacgccgaacaccggccccagagaaggttcgcgcagggcaatcacggcatctttgccgatgtggcgcaacgcgtccgccaaaccgatggttacggtggttttgccttcgcccgccggagtcgggttgatggcggtaaccaaaatcagcctgccctgtttttgcggcagtttgaacgcttcggcaggattgattttcgccttgtaatgaccgtaaggctcaatgttgtcggcattcagaccaagcttggcggcaatttcgccaatcgggcgcatggtggaggattgggcgatttcggcatcggttttgaagctcatgattttcctttagaaatgaggagggacatgccgtctgaaagcatcaggcgacaaacaggtggattgaaaataatatcaggcatattataacgttatccgcaccaaacccgcagtgaaatttttgacgcagcaacaaaaataccgttcatattgttcacaatccaaggagaaaacatgggcagcaacgcatggctgttttgggcattggcatcggcaggcttcgcctcattgaccgctattttcgccaaaatgggtttacagggtatagattccgatttcgccacctttatccgcaccttggtcatccttgccgctttgttattgtttttaacctacaccggcaaatggcagggtgtgaacggctttacggggcgcaactggacattcctcatcctatccggtcttgctaccggcgcatcttggctcgcctattttaaagccctgcaactgggcaacgcctcgcaagtcgcccccatcgacaaattcagcctggtcttggtcgcgctgatggcggtggttttcttggacgaacgcccgaacacgcaggaatggataggcttggggctggtaacggcgggcgtgttggtgctggcgttgaaacgttaaaccgaatccgccataccgtctgaaaccgggtttttacttccaagcccctgcaagggcttgagcctctttcagacggcataccgtgccgacatccagccacaagcccgtatgcttctgaccgctcacgcggttttgccgcatttcgccacgcaatacgggcgcgagtttcgccacactgcccgcttcgattccgtcaaacatttcaggacggtaaatacccacgccgctgaatgtcaatccgttgccgccatttacttccggccgcacgctgctgtcgggcagcagggaaaaatcgccgtcggggttgtgcggcggattttccaccagccacagatgggcggaaatatgttccggcagggacgatgccgtctgaaacgcggcggtaaaatcgatgtcggtcagcacgtcgccgttgaccaccaaaaacggctgcccacccaacagcggcaatgcctgcgcgatgccgcctgccgtttccaaaccgcctgcgggttcgggcgaataggcgatgttcacgccataagccgagccgtcgcccaaagcatcttctatctgccgacccagccaagcgtggttgatgacgatttcggtaaaccccgcctgcttcagacggcataggtgccaaccgattagaggcttacccgccacatcgagcagcggcttcggagtggtatcggtcaaagggcgcatacgctcgccgcgtcctgccgccagtatcatcgctttcatatatctgtccgaatatcagtctaaaaatctaaactgccgtctgaaatacagcagcgcggggcgtttgcacccgcagtttttgatttcgtcgagcctgacgtaaaacacaaaatgcgtgccgatttcatgtttgccgacaatatgcccgtgcaggtgcgccaacgcgccctctatttcaagttgtcccgttttgccgcgatgccagatgtggtaggcaaaccgctcttcgggcgacaggccggtcagcccggcaaaatgttcggcaacatcctgatgttcgtccgccagcgtattgatgcagaggctgccgttttccgacaggatcggaatgattcgcgcactccggttgatgcacagcatcacggtcggcggctcgtcggtaaccggcgcgaccgccgtcattgtaatgccgtaacgccctgccgcaccgtctgtcgtgatgacatgaacgcctgccgcgcaagatgccatcgcatcacggaacgaagtttgaaaatttttctgcaaatccgccatttttcccctttaaactgtcccctatataagaatgctgcacacaaggcatcccccatgtgcagcagttttgattcaaaaagccgtcggtcggacgtttccgcgcgttacggcgtattacgagttcaacgcatcctcgattttggcaagttctgccaacaggtctttaagcagcagcattttctcgcggcccagcacttcctcgatagcgtcgtagcgttcgtccacttcttcgccgatttcctcatacagcttctcgccctcggcagtcagcttcagaaaaacacgtcgttggtcgttggaaggtttcaggcggacaaccaaacccgctttttcaaggcgggtcaggataccggtcaggctggggcgcaaaatgcacgcctgattcgccaaatcttgaaagtccagcgtgccgttttccgccaaaagacggataatccgccattgctgatcggtaatattcgcctgattcagaataggcctgaattgggtcatcagggcttcccttgcctgtatcagaccgatattgatagacgcatgttttgattgggtaggcattgtttaagtctccaagttatcgaaaatcaaactttcaaaccgtcgggaaagcctgtgggcgtaaattttgatgcaaccgttatataacaaaacgaacatatagcaacaatacgctataaaccgcatcggacgactgggtataaaagactttaattccgataatcctatctaaaaatattttaatagttatatcttaatctatttttcccacaatcacaacaagggattacatcggcaggcgcgtcggctctttcccaaaaaacaaaagccgccgcatccgccgcgcaaggcatatgccgcttgattctctacatagcggaaaatttaataaaaacaaaagttaaccgaaaacatccgcctgaaaaattcgtgcgcgcaagccccaataactgctgattcccgtcgtatagtgaaccattttcccatttttgaccaaaacgacggcaggcgttgcgacaatccgccaagaccttgccaaacccccgtcctcatcgttgacagtcggaaagcccaagccgcgttttgccatatacgccgccacttccgccgaactgccggaacgtaccgccacgccgacgaccggcacgccgtccgccgccaaatcatcgattatcggcgactgataacggcacacgccgcaccagctcccccaaaaatacaccaaaaccgccttatctcggctaaactgtcccaaagtcagccgctgccccgacagcagggtcaaaggccgccctgccgcaccggccggctcttcgggcttgcgtatccaatccaaaaacagcgacaccaataaaaacaccaatgccgtctgaacggcaaatttgatgcccgaaagcagtttctttttcatacgctctctcaaacggtacgcccgcgcaaccggcaggcaaacaaaaagccaagtctcaaaacttggcttccggttatctggtgggtcgtgagcgattcgaacgctcgaccaacggattaaaagtccgctgctctaccgactgagctaacgacccgataagccgtgcattatacagcaccatcctacctcgtcaagcaaattttacaggcttaattgcagaccactgtttgcacgggatattttgacaacggattttcacaatccgccgcataccgtgtaaaagttcgcacaaggaaaagcaaaccgcccgaaatcaatgtacactttccgcccgtttcccttcccaacctgcacacagaaacacacattatgaacatacaaaacatccgcaccctcctcgacaccgtcgccgttccgaatacggcacgcacgctcggcggcgaaaaggccgtccgttcggtcgaacagcgttcagacggcatccatatcgccctgcatttcggcttccccgtcgcgcacattgcctcagaaacagccgaccgcatacaggaaatcctgatgcccgaaacaggcgacacacacatccatctgtccatggacactgaaatcggcacacacaaagtccagcccggcgttaccaccatcaaaggcgtgaaaaacatcatcgccgtcgcatcgggaaaaggcggcgtgggcaaatcgacaaccaccgccaaccttgccgccgcaatggcgcgcatgggcgcgcgcgtcggcgtgctcgatgccgacctttacggcccgagccaaccgaccatgttgggtgtggacgaccgcaaacccgatcagaaaaaccaaaaactcattcccgtcgaatcttcagacggcatacaggtcatgtctatcggctttctcgtcgataccgaccaagccgtcgtctggcgcgggccgatggtcagccaagccttgcagcagctgatgttccaaagcgagtgggacgaagtggactacctgtttatcgacctgccccccggcacgggcgacatccagctcacgctgtcccagcgcatccccgtaaccggttccgtcatcgtaaccacgccgcaggacatcgccctgatagacgcgcgcaaagccgtggatatgttccgcaaagtcaacattcccattttgggcgtattggaaaatatgtccgtccacatctgcaccaactgcggacacagcgaagcactgttcggcacggacggcggcaaagatttcgccgcacgcctcaacgtccccctgctcggacagcttcccctaagcctgcccgtgcgcgaagccatggacggcggcacaccggcgcaactgttcgacgaacaccccgccatcgcccgaatctacaccgatgccgcattccaaatcgccctgagcattgccgacaaaggcaaagacttcagcagccgcttccccaaaatcgtcgtcgaataaagccgcgtccgaaaccgcaacagcaatgccgtcccaagccccgcgcctgccggcgggcaaacttgccggataaaacggtttttttgagattttacgttccggattcccgcctgcgcgggaatgacgaattttaggtttctgattttggttttctgttttgtaggaatgatgaaattttgagttttaggaatttattggaaaaaacagaaaccgctccgccgtcattcccgcgcaggcgggaatctagaccttagaacaacagcaatattcaaaggttagctgaagctttagagattctagattcccactttcgtgggaatgacgggatgtaggttcgtgggaatgacgcggtgcaggtttccgtgcggatggattcgtcattcccgcgtaggcgggaatctagaccattggacagcggcaatattcaaagattatctgaaagtccgagattctagattcccactttcgtgggaatgacgggatgtaggttcgtgggaatgacgcggtgcaggtttccgtgcggatggattcgtcattcccgcgcaggcgggaatctagaccttagaacaacagcaatattcaaaggttagctgaagctttagagattctggattcccactttcgtgggaatgacgggatttgagattgcggcatttatcggaaaaaacagcaaccgctccgccgtcattcccgcgcaggcgggaatccagaccttgggataacagtaatattcaaagattataaaagacccgtcattcccgcgcaggcgggaatccagaccttagaacaacagtaatattcaaagattataaaagactcgtcattcccgcgcaggcgggaatccagactgtcgggcatctgcagcggtttgctaaaaaacgctttaccgtgatcagtgtgcaaagttaaaatggggaggtaagcttttcaatcagcaatccggcgggcgcgggatcgggcggtttaccgaaccccggtgttcgcggcgcgcctgccgccgacggtatcccgcgaagcaagatttaagggataaaatatgttccaacacgcagggcggcacataaggcgccgccctgattcggaagggcttgcacccctcccggacaaagcctgatcctgccgccccgaaggacggatgcccgaagggcggggggtttgaccgaaaaggaaatacgatgaataaaactttaaaaaggcgggttttccgccataccgcgctttatgccgccatcttgatgttttcccataccggcggggggggggggggcgatggcgcaaacccataaatacgctattatcatgaacgagcaaaaccagcccaaggtaaaggggaatgggcaatattcaacaataaaggacaaagacagggaacgcaaatttatctataataaaagcggccggggtggaggctctgtctttttcgacaataccgatacccttgtttcccgacaaagcggtactgccgtttttggcacagccacctacctgccgccctacggcaaggtttccggttttgatgccgacgggctgaaagagcgcggcaatgccgttaattggattcatacgacccacccagggttgataggctacagctacaccagtgtcgtatgcagagacagcacaggctgtcccaaacttgtctataaaacccgattttccttcgacaacaccggtttggcaaaaaatgcgggcagcctggataggcacccggacccaagccgcgaaaattcgcccatttacaaattgaaggatcatccatggttgggcgtgtctttcaatttgggcagcgagaataccgtcaaaaatggcaactcattcaacaaattgatatcttcttttagtgaagacaataataatcaaaccatcgtctctacgacagaaggctcccctatttcccttggcgaccagcagcgcgaacataccgccgtggtctattatctgaacgccaaactgcacctgctggacaaaaaagggattaaagatatcaccggcaaaacagtgcggttgggtgtcttgaagccgagcatcgatgtgaagacacaaaatacggggcttggcggcattctagcttattgggctaggtgggacattaaagataccgggcagattccagtcaagctcggcctgcagcaagtcaaagcaggccgctgcatcaataaaccgaaccccaatcccaacaaaaaagacctttcgccggccctgactgcccccgcgctgtggttcggacctgtgaaagatggtaaggcggagatgtattccgcttcggtttctacctaccccgacagttcgagcagccaaattttcctgcaaaacctttcccgcaaggatgacacaagcaaaccgggccgctattccctcaaacccttgagtacgtcggagattaaaagtaaagagccgagtttcacggggcggcaaaccgtcatccgattggatggcggcgtacggcatatccaactggatagaaacaatgaggccaccggtttaaatggaaatgacggcaaaaacgacactttcggcattattagagaagggagcttcatgcctgatgccagcgagtggaaaaaagtattgctgccttggacggttcggggttttgctgatgacagtaaatttaaagcattcaacaaagaagaaaacaacgacaacaagccaaaatacagccaaagataccgcatccgcgaaaacggcaagcgcgatttgggcgacatcgtcaacagcccgattgtcgcggtcggcgagtatttggctacttccgccaacgacgggatggtgcatatcttcaaaaaaggcaacggggacgcgcgcgactatagtctgaagctcagttatatcccgggcacgatgccgcgcaaggatattcaaaacaccgaatccacccttgccaaagagctgcgcacctttgccgaaaaaggctatgtgggcgaccgctatggcgtggacggcggctttgtcttgcgccgcattacagatgaccaagacaagcaaaaacacttctttatgttcggcgcaatgggctttggcggcagaggcgcatacgccttggatttaagcaaaatcgacaacagcaacccggccggcgtttccatgtttgatgtcaaaaacgacaatggcgtgaaattaggctacaccgtcggtacgccgcaaatcggcaaaacccacaacggcaaatacgccgccttcctcgcctccggttatgcgactaaagacattaacaacggcgagaataaaaccgcgctgtatgtgtatgatttggaaaacaacaacggtacgccgattgcaacaatcaacgtacccgacggcaagggcgggctttcgtcccccacgttggtggataaagatttggacggcacggtcgatatcgcctatgccggcgaccgcggcgggaatatgtaccgctttgatttgagcaacaacgatccgaccaaatggtctgtacgtactatttttaaaggcacgctggataagccgattacctccgcgcccgccgtttccaaactgaaagacaaacgcgtggttatcttcggtacgggcagtgatttgagtgaggatgatgttgataaaaaggatatacaatctatttacggtatttttgacaatgacacaggcacggatgtggcagaagaaggacagggcaaagggttgctcgagcaacaccttactcaggaagataaaaccttattcctgaccgattacaagcgatccgacggctcgggcgacaagggctgggtagtgaaattggaagccggacagcgcgttaccgtcaaaccgaccgtggtattgcgtaccgcctttgtaaccatccgcaaatataacgacggcggctgcggcgcggaaaccgccattttgggcatcaatactgccgacggcggcaagctgaccaagaaaagcgcgcgcccgattgtgccggaagccaatacggctgtcgcgcaatattccggtcataagcaaaccgccaaaggcaaatccatccctataggttgtatgtggaaaaacaatgaaaccgtctgcccgaacggatatgtttacgacaaaccggttaatgtgcgttatctggatgaaaagaaaacagacggattttcaacaacggcagacggcgatgcgggcggcagcggaacattcaaagagggtaaaaaacccgcccgcaataaccggtgcttctccggaaaaggtgtgcgcaccctgctgatgaacgatttggacagcttggatattaccggcccgatgtgcggtatgaaacgaatcagctggcgtgaagtcttcttctgatttgcacgcgaaaatgccgtccgaaaggttttcggacggcattttttgcgtttttcgggaggggcgggttcgtaaaaggcgggctatagggtaggcttcatctcgccaatctcactgaatccatcaatttccacaattcaattaaataccgtcaaaccgatgccgtcattcccgcgcaggcgggaatctagacattcaatgctaaggcaatttatcgggaatgactgaaactcaagaaactggattcccactttcgtgggaatgacgggatgcaggttcgtgggaatgacgtggtgcaggttcgtaggaatgacgtggtgcaggtttccgtgcggatggattcgtcattcccgcgcaggcgggaatccagacattcaatgctaaggcaatttatcgggaatgactgaaactcaaaaaactggattcccactttcgtgggaatgacgggattagagtttcaaaatttattctaaatagctgaaactcaacgcactggattcccgcctgcgcgggaatgacgaagtggaagttacccgaaacttaaaacaagtgaaaccgaacgaaccggattcccactttcgtgggaatgatgggattagagtttcaaaatttattctaaatagctgaaacccaacgcactggattcccgcctgcgcgggaatgacgaattttaggtttctgattttggttttctgtttttgtaggaatgatgaaattttgagttttaggaatttatcggaaaaaacagaaaccgctccgccgtcattcccgcgcaggcgggaatctaggacgtaaaatctcaagaaaccgttgtacccgataagtttctgcgccgacaaacctagattcccgcctgcgcgggaatgacggttcagttgcgtaggactggattgtgaaaaggggcggattcggtgaaaacggcggaaatgtgggattgatggaatcggtgggctgaagccctccctacagagctttcagacggtattgtttgcgttttcgggatgggggcaaatgaaacaccgacaaaccgataccgtcattcccgcgcaggcgggaatctagacattcaatgctaaggcaatttatcggaaatgactgaaactcaaaaaactggattcccactttcgtgggaatgacgattcggacattccttaaactacccgtgtatcgctgtaaatcttagagatggaggaataaagaccgttgggcatctgcagccgtcattcccgcgcaggcgggaatctaggatgcggaatctcaagaaaccgttatacccgataagtttctgcaccgacaggtctggattcccgcctgcgcgggaatgacgattcgggtatttctgacggttcgggcattcccgacaaggtggattttcaaggtgttgtatagggtgtaggaggattcgtaaaaggtgagttatagggtgggcttcagcccaccgattccaacgattccaccaatcctacaccgttcccatagactcaaatcaacacagaaacttatgcgccgtcattcccgcgcaggcgggaatctaggatgcggaatctcaagaaaccgttatacccgataagtttctgcaccgacaggtctggattcccgcctgcgcgggaatgatggttcgggtattcctgacgattcgggtattcctgacgattcgggtattcctgacgattcgggtattcctgacgattcaggtattcctgacgattcaggtattcctgacgattcaggtattcctgacgattcaggtattcctgacgattcaggtattcctgacgattcaggtattcctgacgattcaggtattcctgacgattcaggtattcctgacgattcaggtattcctgacgattcaggtattcctgacgattcaggtattcctgacgattcgggtattcccatagtttcgccgggcggacgtggggaaatgcgtaacgggcatagtgggcgcggagcgggcggttttatgccccggatttccgttttcgcgcgaacatatcagcccgcctgccgcgtttgcgcttgaaatcgggtatgtttcgtcttaaaatatgctgctttcagggtataggcacttgcccgaaaagcacgttacgcgtctatcttgcgcggcgtgtttttttttgaccggatttttccgaccggatgccccctgccgaagtcccttcagacggcattgtcaagaattttattaaaaacaggattcccatcatgagcacccccgccctcctcgtcctcgctgacggcagcgtatttcacggcacatcaatcggttacgaaggttcgacttccggcgaagtcgtgttcaatacttcgatgaccggctatcaggaaatcctgaccgacccgtcctactgcaaacaaatcgttaccctcacctacccacacatcggcaacaccggcaccaacgccgaagatgaagaaagccgcagcgtttatgccgccggcctgattatccgcgacctgccgctcttgcacagcaacttccgcgcctccgaaagcctgcacgactatctggtacgcaacaaaaccgtcgccatcgccgacatcgacacccgccgcctgaccacgctgttgcgcgaaaaaggcgcgcaaggcggtgcgattctgaccggtgcggatgccacaatcgaaaaagcgcaagaactcatcgccgcgttcggcagcatggtcggaaaagatttggcaaaagaagtttcctgcacggaaacttacgaatggacggaaggcgaatgggcattgggcaagggtttcgttacccctgacgaacagccttaccacgtcgtcgcctacgatttcggcgtgaaaaccaacatcctgcgtatgctcgcctcgcgcggctgccgcctgaccgtcgtccccgcccaaacgagcgcggaagacgtgttggcactcaaccctgacggcgtattcctatccaacggccccggcgaccccgagccttgcacctacgccatcaaagccgtacaaaaactgatagaaagcggcaaaccgatttttggcatttgcttgggacaccagctcatcagcctcgccatcggcgcgaaaaccctgaaaatgcgcttcagccaccacggtgcgaaccaccctgtgcaagatttggacagcggcaaagtcgtcatcaccagccaaaaccacggttttgccgttgatgccgacaccctgcccgctaacgcacgcattacccacaaatccttgtttgacaacactttgcaaggcatcgagctgaccgacaaacctgtgttctgcttccaaggccaccccgaagccagccccggtccgcaagatgtcggctatttgtttgacaaattcattggcaatatgaaagcggcaaaacgggcataatggttttcagacggcaacagtatgctgctgccgtctgaaaaacaaagctggaaatgaagattagcgcactcgaccatctagtactaactgttgccgacattgaccgaaccatcgcgttttatagtgaattaaatttaaaccggtacagcgttggctcgccttgccgtactatttgtactgtctgcggctcgccgccttgtcctgatttttgttaattcactatacacacaagttttgggcatggaagaagtttcatttggcagcgaccgtaaagctttgttgtttggcagtcagaaaatcaacctacacgggcgcggtgcggaaattcagcctaacgcgcaacacgccgcctgcggcacagcggatttatgcctgctgaccgatacgccactggaaacggttttacaggaattatccgcacacggcatcaaacctttaagcggcatcgtagcgcgcacaggcgcaatgggcaaaatccaatcggtttacctgcgcgatcccgatggcaacctgctggaaatcagcagttattgattttcagacggcttatgcaaaataaaaaacagcctgcacaagctgttttccttgcagcctctttaaccccaacagccgccccgtcctctctccctgtgggaaagcgttagagagagggcaacaagccgcaaggcttgtgtttgggcggttagggtgttggggaaggttgccgaaattcggggaatgccctctccccggccctcccccacgggggagggagaaggttgcagcagattttgcggttgcaggcggtttgaaaggcaacttagatttgcagctgttgtttcaggtcatctgaaaaataaaaagcagcctgcacaacctgttttccttgcaaaacccttaatcccaaccgccaccacgtcctctctcccatgggagagagtcagagagagggcaacaaactgtaaggcttacacaaacagtaacccgacaacagaatgagcacgcacgagaaacttttaaccgccgacaaccccgtcctgcatcaacgcgccaaagccatgcgccaagaaatgagcgaggcggaagcaaaattgtggcagcacctgcgggcaggccgtctgaacggctataaattccgccgccagcagccgatggggaattatattgttgattttatgtgcgtaacgcccaagctgattgtcgaagcagacggcgggcagcacgcggaacaagccgtatacgaccacgcgcggacggcatatctcaacagcctgggctttaccgtgctgcgtttttggaatcacgaaattttgcagcagacaaacgatgtactggcggaaatcctgcgcgtattgcaggaattggaaaagcagtatgcgcaataacaaacggttaattttgattagagttttgaaaattataggatacaggtagggtacaggctgcttgaattgagcgtttagaagaccgtctgaaaaacaaaaaacagcccgcacaacctgtttttcctgcagaacccttaattccaacagccgccccgtcctctctccctgtgggaaagcgttagagagagggcaacaagccgcaaggcttgtatttaggcggtgaaggcattggggaaggttgccgaaattcggagaattccatctccccagccctcccccacgggggagggggcaggttgcagcggattttgcggttgcaggcggtttgagaaagaatgcccgaaatatcaacagcgggaatttttcaggcagcctttatcgcaaggcaggtggaacaaacgccgcgaacgttttttcagacgacctttgaactcatcggcagagagtgtgccgcaaggcacgcacgcggtgggttggggttgcagggaaaatggagaacgcgtgcatacgtaccgcacataccctacatacgggctacggcttgctacgatacgggggtttcgatatacaagttaggttttagcaaacccaacattttagacaattaagcggtttgtgttgggttttcaacccaacctacgcttgctacgtttattgcaacatattcgcaggagtttaaatatgtcaatacctattaatttcaataatttaaagtatttgcttaatgatatgagaaacaaaaatagaataattgaagcatttccttttaattataatcaaaggcaatacgccgttattttgactaggtataaacctgatgaacctagaccagatgattatgcacaagcaaaattagagttttttaatttgaatagtgaaaattcaatatttgcgtatgctgatttttatgaagttcattttaaaagtgctactgattttattaatttttttaaaattaatgttcaggctggtgctgcgaaaatcagagaaatttttcagagttttagtaatctttttgcagatttcattccaacacaaactaaaaaagatttagacataatttataaaaagattgtagctactcgtttagaacctaattctcctaacactatttattgctatgatgtccgtagaaatgggaaagataaggctggcaagcctaatcgcaggagcgtggaaaatagtgaaaaagcaaaaattttgcgcccagagctatacgaaaaatttaaagccgatagtaattacagttttttcttttcagataatccaagcgatgaaaaaacagatgcagaaataattagagaagttaccaatcgtcaataatccaaattcttcaaaagaaagacccaccatgcccaaacgtaccgacctaaaatccatccttatcatcggcgccggccctatcgttatcggtcaggcctgcgaatttgactattcgggcgcacaggcctgcaaagccttgcgtgaagaaggctataaagtcattttggtgaattccaaccccgccacgattatgaccgaccccgaaatggcggatgttacctacatcgagccgattatgtggcagacggtggaaaaaattattgccaaagagcgtcctgacgcgattctgcctaccatgggtggtcagactgcgctgaactgtgcgctggatttggcgcgcaacggcgtgctggcgaaatacaatgtcgagctgatcggcgcgaccgaagacgccatcgacaaagcagaagaccgtggccgctttaaggaggcgatggagaaaatcggcctctcctgcccgaaatcttttgtctgccacacgatgaacgaagctttggcggcgcaagaacaggtcggcttccctaccctgattcgtccttctttcaccatgggcggttcgggcggcggcattgcctacaataaagacgagtttttggcgatttgcgaacgcggtttcgatgcgtcgcccacgcacgagctgttgattgagcagtccgttctcggctggaaagagtacgagatggaagtggtgcgcgataagaacgacaactgcatcatcatctgctcgattgaaaacttcgacccgatgggcgtgcatacaggcgactcgattacggttgcgccggcgcaaacgctgacggacaaggaatatcaaattatgcgtaatgcttcgctggcggtattgcgcgaaatcggcgtggacacgggcggctcgaacgtgcagtttgcggtgaaccctgcaaacggcgagatgattgtgattgagatgaacccgcgcgtgagccgttcttccgcgttggcttccaaagcaacgggtttcccgattgcgaaggtggcggcgaagctggcggtcggctttacgctggacgagttgcgcaacgacatcaccggcggcaaaacccccgcgtcgttcgagccttccatcgactatgtggttaccaaaatcccgcgtttcgcgtttgaaaaattccctgccgcagacgaccgcctgaccacgcagatgaaatcggtgggcgaagtgatggcgatgggccgcacgattcaagaaagtttccaaaaagccctgcgcggcttggaaacaggcttgtgcggcttcaatccgcgcagtgaagacaaagcggaaatccgccgcgaactggcgaaccccggccccgaacgtatgctgtttgtggcagacgcgttccgcgcgggcttcacgctggaagaaatccacgaaatctgcgccatcgacccttggttcttggcgcaaatcgaagacttgatgaaggaagaaaaagcggtttcagacggcattttgagtgatttggatttcgccgccctacgtcgtctgaaacgcaaaggcttctccgacaaacgtttggcacaattgttgaacgtaagcgaaaaagaagttcgcgaacaccgctacgcgctgaagctgcatccggtttacaaacgcgtcgatacctgcgccgccgagttcgccaccgaaaccgcctatctttactccacttacgaagaagaatgcgaatctcgtccttccgaccgcaaaaaagtgatgattctcggtggcggcccgaaccgcatcggtcagggcatcgagtttgactactgctgcgttcacgccgcgctcgccctgcgcgaatcgggctttgaaaccatcatggtcaactgcaaccccgaaactgtgtccaccgacttcgacaccagcgaccgcctgtatttcgagccgctgacgctggaagacgtgttggaaatcgtccgcaccgaaaacccgtggggcgtgattgtgcattacggcggccaaaccccgctcaaactcgccaacgcgctggttgaaaacggcgtgaacatcatcggcacgtccgccgacagcatcgacgccgccgaagaccgcgaacgcttccaaaaagtgttgaacgacttaggcctgcgccaaccgcccaaccgcatcgcccacaacgaagaagaagcgctcgtcaaagccgaagaaatcggctatccgctggtcgtgcgcccgtcttacgtcctcggcggccgcgccatgcaggtcgtccattccgccgaagagctgcaaaaatacatgcgcgaagccgtgcaggtttccgaagacagccccgtgttgctcgacttcttcctgaacaacgcgattgaagtggatgtggactgcgtttcagacggcaaagacgtggttatcggcggcatcatgcagcacgtcgaacaggcgggcatccactccggcgactccggctgctcgctgccgccctactccttaagcgaagaaatccaagacgaaatccgccgccaaaccaaagcgatggcgtacgcgctgggcgtggtcggactgatgaacgtgcagtttgccgtacaagacggcgtagtgttcgtattggaagtgaacccgcgcgccagccgcaccgtgcccttcgtctccaaagccaccggcgtgccgctcgccaaagtcggcgcgcgctgcatggcaggcatttccctgaaagaacaaggcgtggaaaaagaagttgtccccgatttctatgccgttaaagaagccgtgttcccattcatcaaattcccgggcgtggatacgattttgggaccggaaatgcgctccaccggcgaagtcatgggcgtgggcgcaagctttggcgaagcctactacaaagcccaactcggcgcgggcgaacgcctcaacccgaccggcaaaatcttcctctccgtgcgcgaagaagacaaagaacgcgtcattaaaaccgctaaaaacttccaagttttaggctacggcatctgcgccacgcgcggcacggcgcaatacctgaccgaacacgggctgattgtgcagaccatcaacaaagtacccgaaggccgcccgcacatcggcgacgcgctgaaaaacggcgaaatcgcactggtcgtgaacaccgtttccagcgatccgcaatccgtgtccgacagccacatcatccgccaaagcgcattgcagcaacgtgtgccgcaatacaccaccaccgccggcggcgaagcgatgagcgaaggcgcgaaaagccgagaccatctgggcgtgtacagcgttcaagaactgcacgggcgtttgaaaaaccgcaactgatgcctgaatcaggttgaaaatgccgtctgaagccgttttgcggtttcagacggcattttgtcatttggaaagccgatgttgccacacacaagccgtacataaggaacagccctatcacgctccccatatagattgccattgccgccgactatacattatcttatttattttttctcaaagttattaagtgagtaaaaacagttttatgacaggtttttatagaattatccacagagattgtttcccagttcctccactaaaaaatccaaaaatacgcgtaagcggagattgacggctttatcgctgtaataaacagcattaaaggggtgtgttttatcggaggtttgttcggcgagcaggggaattaactttccttcagcgatgtcgttgtcaaccaaaaaatctgataagcaaacaataccgcaacctgaaaggcacaacgagcgtaagatttcaccgctgctggcggtaaagtgcggtgaaatcttatagggatttccctgcgcatctaaaaccgcccatgtatttagagaaccgggttcggtgaagcctaaacattggtggccggcaagctcttctgtagattgcggcgtgccgtgttttgccaggtattcaggactggcgattacgcggaagcggctgtcaaacagatggcgtgcacgcagcccggaatcgtccaattctccggcccgtaaggcaatatcgactttgcgttcaatcagattgatatagccttcggaagaaacgagcgaaagtcggatatgcggatagcgttcgttgaattttgctgccagcggcgccagcagatgcagcaccatcggcatcgcggaatccacgctcaacacgccttgcggtatttcgtgcactgccagcatttcggtttccgccgctgccatttcttgcaggattctctgcgcgcggcggaaatattgcgcgccttcttccgtcagactgagttgccgcgtggtgcggttgagcaggttcacacccaacttttcctccagccgtttgacgatgcggcttacggcagaatttgccatcgccaactgctccgccgcacggctgaagctgccgctttccaccacttgaacaaatacggtcagttcttctgaattggttttcatcgtgtttccttttcggttggaaccccgccctttagggcggcaggatcagactttatttgggaggggtgtaaccccttccgaatcaggacggcacacagggcggtgctttatgtgccatcccgtgtgttggaacatctgattatttcatttgacgcaaaagtgttttcttatttttgcacttttaaattataaagtaaaacggcacaatacattcatcaattcacaaacgaggtaacaaatgaatattttattattagacggcggcaaggcgttcggacattctcacggcgggttaaaccgtacgcttcacaaaaaagcgaaagaagttttgaccgcgctcggacacaatgttcaagaaaccgtgattgatgccggctatgatgttgaggcagaaatcgaaaagttcgtttggatggatgctgtgatttggcagatgccgggctggtggatgcacgagccttggacagtgaaaaaatacatagacgaagtattaaccgctggacacggcaaactctaccaaagcgacggcagacacagcgtcaatccgactgagggctacggcacaggcggcttgttgcaaggcaaaaaacatatgatttcactgacttggaatgcgccgattgaagcctttacccgcgaaggcgatttctttgaaggcaaaggcgttgatgttttgtatatgcacttccacaaagccaacgagtttttgggtatgacccgcctgccgacattcttatgtaacgatgtggttaaaaatccgcaagtggaaaaatacttggcagattatcaggcacacttggaaaaagtgttcggctaaaaatttatcttataaacaaacaaaggcagcctgaaagattgaatggtctgcacccctaaggttggactaaccaaccgactaaggtgcagattattttttgttgctttttcagcttttcgttgggttagatattcttgcccactgttttcaggcagccttgaatacaaaaaaatggcgtatgtaatatgtttatacgaccaaaacggaatgaattttaacgtattgcgcgtcatcaacaatgactgagtttctcgcctctcgcgcctgaatctatagtggattaacaaaaaccagtacagcgttgcctcgccttgccgtactatttgtactgtctgcggcttcgttgccttgtcctgatttaaatttaatccactatatgtcatgcagttcctttcattcaaatcaacaaaagaatgccgtccgaacgtccgttcagacggcacttgtcttcccacaatagacttgaggctgttctaacgtaccaccccttcgttccgccccaaaaccatcgcatcgccgtagctgaagaaacggtattcgcgttcgaccgcatgacgatacgcggcgcggatatgacccatacccgaaaacgcgctgaccaacatcagcagcgtcgatttcggcaaatgaaaattggtaaccagtctgtcgacaacattaaaacggtagcccggcgtgatgaaaatatcggtgtcgccctgccccgctttcagacgacccgtcgcacgcgcggcagattcgagggcgcgcatggaagtcgtgccgaccgcccagactttgttcccccgggcttttgccgcctcaacggcggcggcggtttcagacggcacttcaaaccattcgctgtgcattttgtgctcttcgattttgtccacacgcacgggttggaacgttccggcaccgacgtgcagggttacttctgcggttaccgcgcctttgtctttcagacggtgcaaaagttcttccgtaaaatgcaggcccgccgtcggcgcggcgaccgcgccctgatatttggcataaacggtttgataacggctgtcgtcatccgcatcggcggcgcgttcgatataaggcggcaggggcaggtgtccgttctgttccaaaagttcgtaaacggtctctccgccttcaaaacgcaggcagaacagttcgccctcacgcccgaccgtcacggcgcggatgccgccttcaaacaccagccccataccgggcttgggcgatttggacgaacggatgtgcgccagtgcggtatggttgtccaacacgcgctcaatcagggcttcgatcctgccgccgctgtctttctgcccaaacagccgcgccttcatgactttggtgttgttgaacaccaaaacgtcgcccgcctcgacataatccggcaaatcgccgaacacccggtcttgcagcggcatatcgggcaacgcaaccaaaaggcggctgctgccgcgcacttcgggcggatgctgggcaatcagcttttcgggcagggtaaaatcaaaatctgaaatatccatttttacactctcgttcgggcaagccgccattatacgcactttagccctttttcagacggcatctttgtccgaaaaaccaacagattagaataaacactcttaacctggaacatcttgtgcgcaaaatcaaacttcctgcacatttcccccaaaaaccgccgttttttgatattttactggacatttaccgacaacttcgggaaaataaacacattctcacggtcgttttccaccacaggaaaaccgtatccgaacaccattccgcccggtttgcgccgttgccgcaagccggctgttttctgaaaaaccaacgcaacaacccgccggaacaccggcagcctttaaaggaacagaaatggatttgcgcaaattaaaaaaactgattgatttggttgaagaatcgggtatcgccgaaatcgaagtaaccgaaggcgaggaaaaagtccgcatcacccgaaccatcgccgccgcacccgtttacgccgcgcccgtacctgccgccgcgccggccgtaacgcctgccgccgcacccgttgcggcatccgcgcccgccgccgcacctgccgcccgcgatttgtccgacgcgcaaaaatcgcctatggtcggcacgttctaccgcgcacccggcccgaatgccgcgccttttgtcgaagtcggccaacaagttaaagccggcgacacgctgtgcatcatcgaagcgatgaagctgatgaacgaaatcgaagccgaaaaatccggcacggtcaaagaaattttggtcgaaaacggtacgcccgtcgaattcggcgaaccgctcttcattatcggataatcctgttttcagacggcataaacttccgatgccgtctgaaatgctttcccccttcagcgttcccgcacccttttttacggacgggttgccggaaccgcaggaaaggtcatcatgctgaaaaaagttttaatcgccaaccgaggcgaaatcgcattacgcgtactccgtgcctgccgcgaaatgggcattgccaccgtcgccgtgcattccgaggccgacaaagacagcctgcacgtcaaactcgccgacgaatccgtgtgcatcggccctgccgcttccgcgcaaagctaccttaacgtccccgccattatcgccgccgccgaagtaagctgcgcggacgctgtccatccgggttacggtttccttgccgaaaacgccgatttcgccgaacaggtcgagcagtccggctttacctttatcggcccgaaacccgacaccatccgcctgatgggcgacaaagtctccgccaaacacgcgatgatagcggcaggcgtaccctgcgtccccggttctgacggcgcattgcccgacgacggcgaagaaatcctcaaaatcgccgataaagtcggttatcccgtcattatcaaagcctctggcggcggcggcggccgcggtatgcgcgtggtcgagaaaaaagaagacctcctccaatctgtcgaaatgaccaaagccgaagcaggcgcggcattcggcaacccgatggtttacatggaacgctatttgcaacgtccgcgccacgtcgaaatccaagtgattgccgacgaacacggcaacgccatctaccttgccgagcgcgactgttcgctgcaacgccgccaccaaaaagtcatcgaggaagcaccggctccgttcatcactgaaaaagaacgcgccaaaatcggcaacgcctgtgccgatgcctgcaaacgcatcggctaccggggcgcgggtacgtttgagtttttatacgaagacggcgaatttttctttatcgagatgaacacgcgcgttcaggtcgagcatccggttaccgagctcatcaccggcgtggacatcgtgcaggagcaactccgcatcgccgccggcctgcctttgcaatacaaacaaaaggatattcaagtcgaaggccacgcgtttgagtgccgtatcaacgccgaagacccgtacaacttcattccaagcccgggcctgattgaaagctgccacctgcccggcggcttcggtatccgcgtggacagccacatttaccaaggctaccgcatcccaccgtactacgacagcctgatcggcaaaatctgcgtacacggcaaaacgcgtgaacaggcaatggcgaaaatgcgcgtcgcactcgccgagctggcggtaaccggcatcaaaaccaatacgccgcttcaccgcgacctgttcgccgatgcgggtttccaaaaaggcggcgtcagcatccactatttggaacactggctggaagatcgcaaagccaaacaggacaagtaaaccgccgccgatatgccgtctgaagccgcccgtccgcgttcagacggcatttcccttgccccgcgccgtctgaaaccgatttcgatatagtggattaactttaaaccagtacggcgttgcctcgccttagctcaaagagaaagattctctaaggtgctgaagcaccaagtgaatcggttccgtactatttgtactgtctgcggcttcgtcgccttgtcctgatttaaattcaatccactatatttccaagaaagcccgttatgccctaccaacaaatcaccgtcaacgtcaacgatgccgtcgccgaacgcctcgccgacgcgctgatggaacacggcgcactctccgccgccatcgaagatgcctacgccggcacgcaaaacgaacaggcgattttcggcgaacccggtatgcccgccgaacaaatctggcagcagagcaaagtcatcgccctgttcggcgaacacgacgaagccgccgccatcatccaaaccgccacacaagaatgcgggttaaaagacttggcatacaccggcgaaaccatcgaagaccaagactgggtgcgtctcacgcaatcgcaattcgaccccatccggatttccgaccgcctgtggattaccccctcttggcacgaagtccccgaaggcagtgccgtcaacctccgcctcgaccccggactcgccttcggcaccggcagccacccgaccacgcgcctctgcctcaaatggttggatacgcaactcaaaaacggcgaaagcgtcctcgactacggctgcggttcgggcatcctgaccatcgccgccctcaaactcggtgcaggtttcgccgtcggcgtggatattgacgaacaggccgtccgcgccggcaaggacaacgccgcgcaaaacaacgtcgatgcacaattcttcctgcccgacggtctgcctcaagggcaattcgacgtagttgtcgccaacatcctcgccaaccctttgcgtatgcttggcgaaatgctcgccgcccgcaccaaacagggcggacgcatcgtgttgtccggtttgttggacgaacaggccgaagaactcggcggcatttacagccaatggttcgacctcgacccggcggaaaccgaggaaggatgggcgcgattgagcggcgtaaaacgctgaaacggaaaggaaacaccgtgcaggataaaaacaacctctgctggctcgatatggaaatgacggggctgaatcccgaaaccgaccgcattatcgaagtcgcgatgattattaccgactcggatttgaatgtgttggcgcaatccgaagtttacgccgtccaccaaagcgacgacgtgctgaacaaaatggacgaatggaacaccgccacacacggcaggacggggctgacacagcgcgtacgcgaatcgtcgcataccgaagccgaagtcgaacagaaactgctggactttatgtcggaatgggtacccggacgcgccacgccgatgtgcggcaactccatccaccaagaccggcgttttatggtcaaatatatgccgaaactggaaaactacttccactaccgcaacctcgacgtttccacgctgaaagaactcgccaaacgctggaatccgcccgttgccaaaagcgtcgtcaaacgcggttcgcacaaggcattggacgacattttggagagcatcgaagaaatgcgccactaccgcgaacactttctgatttccgccccgagagccgaagcgcaataagaaacaaacaatgccgtctgaaacgcagtttgcatttcagacggcatttttacagcagattgaaatcaaaaatatacacgcccgtcattcccgcacaggcgggaatccggaaggtcgggcctgccgttattttcaatcattacagaaactgaaaggtctggattcccgcctgcgcgggaatgacgggcgtgtgcattcttatagtggattaacaaaaatcaggacaaggcgacgaagccgcaaacagtacaaatagtacgaaaccgattcacttggtgcttcagcaccttagagaatcgttctctttgagctaaggcgaggcaacgccgtactggtttttgttaatccactatacttcaatctgccaaacagatcgaacagagaaaccctgtccgtcaaaacatcattcagccatcgccttgaacacttcaaccgcaaccgcaaccgtttcgtcaatcagctcgggcgtatgcgcggcggaaacgaaacctgcttcataagcggacgggccgaaggcgacattgcggtcgagcatcccgtggaaaaactgtttgaagccttcaatattggaacgcgccatatcggcatagtttcgcggcgcgtgtgcggcgaaatacagaccgaacataccgcccacgctgtcggcggtgaactcgatgcccgccgcatccgctgccgtccgaaaaccttgaaccaactgttcggtacgcgccgtcaggttttcatagaagccttcgcgctggatgatttccagcgttttcaagcctgcggcgacagcaatcgggttgcccgacaaggtgcctgcctgatacacgccgcccagcggggaaatacattccataatgtctttgcgcccgccaaacgcggcaagcggcataccgccgccgatgactttgcccatcgtggtcaggtcgggcgtgatgccgtgcaaagattgcgcgccgccgagcgcgacgcggaagccggtcatcacttcgtcgtaaatcaacaccgcgccgtatttttcggtcaatccgcgcaaggctttgacaaaggcttcggtcgggcggacgaggttcatattgccgacgaagggttcgacaatcacgcaggcgatttcattgccgctttgagcaaaggcttcttcgagttgggcgatattgttgtactcgagtaccaaagtgtgtttggtaaagtcggcaggcacaccggcggaagacgggttgccaaacgtcagcagaccgctgccggctttcaccagcaggctgtcggaatgcccgtggtagcagccttcaaacttgatgattttgtcacgcccggtaaaaccgcgtgccagacggatggcggtcatggtcgcttcggtaccggagctgacgaggcgcagccgttcgacggacggcatgattttggcgatttcttcggcaatgacgatttcgccttcggtaggcgcgccgaacgacaaaccgcccaatgcggcttcgcatacggtttcgacgacttcggggtgcgcgtgtccgacaatcgcaggtccccacgagccgacgtaatcggtatagcgcgtgccgttttcgtcccaaacatacgcgccttcggcttttttgataaagcgcggtacgccgccgacgctgccgaatgcgcggacgggggaattcacgccgccggggatgatggctttggcgcggtcgaataaaatttcgttacggttcatatatatcctcaaatgccgtctgaacggcaggtttcgggcttggaagcagaaagccccattttatcatttttcaggttgcgacaaggatttgcccgcttctttgcggatcacgccaaccgcatcccggatgacggaacgctcgtctttttccactttatgtgtaaagcggtagtctcggacgactccctccccgtcgtaatccacacaccactcccaatgtcggcgttctgatttcatataaatgaaattggtcggcaaaaaattataaatcggcaggctgacttcatgataggcataacaaccgaaagggttgcgcttcccgaaacgtgcctctacacctccgcccgggtcgttttgcctttaacaaccgtttgtgcgattccctcttccgtctgatatagtggattaacaaaaatcaggacaaggcgacgaagccgcagacagtacagatagtacggcaaggcgaggcaacgctgtactggtttttgttaatccactataacgcaggaactgatgttccctgtcgccgaaattgctggtacacgcacacagcagcaatgccgcccatacagccggtttcatacacatctcccattaaagccaaacattatacagccgtcccgaccgattaaattcatattttaaaacaatatcctgcctccaaaacccacatcgtgctataatccgcaccgattttcagacggcatcgtcgtgccgtctgaaattttttcattccaacaacaatcagccccgcgattacggctgcctgagaaagacacaaaccatgaaaaaagtatttatccgcaccttcggctgccagatgaacgaatacgacagcgacaaaatgctcgccgtcctcgccgaagaacacggcggcatcgaacaggttacccaagccgacgaagccgacatcatcttgttcaacacctgctccgtgcgcgaaaaagcgcaagaaaaagtcttctccgatttggggcgcgtgcgtccgctcaaagaaaaaaaccccggcctcatcatcggcgttgccggctgcgtcgcctcgcaagaaggcgaaaacatcatcaaacgcgcgccttatgtggacgtggttttcggcccgcaaacgctgcaccgcctgccaaaaatgattgtggacaaagaaaccagcgggctgtcgcaagtcgatatttccttccccgaaatcgaaaaattcgaccacctgccgcccgcccgcgtcgaaggcggcgcggcatttgtatcgattatggaaggctgttccaaatactgctccttctgcgtcgtcccctacacgcgcggcgaagaattctcccgcccgctcaacgacgtattgaccgaaatcgccaaccttgcccagcaaggcgtgaaagaaatcaacctcttgggacaaaacgtcaacgcctatcgcggcgaaatggacgacggcgaaatctgcgacttcgccaccctgctgcgcatcgtccacgaaatccccggcatcgaacgtatgcgcttcaccaccagccacccgcgcgagtttaccgactcgattatcgagtgctaccgcgacctgcccaaactggtttcccacctgcacctgccgattcaaagcggttccgaccgcgtattgagcgcaatgaaacgcggctacaccgctttggaatacaaatccatcatccgcaaactgcgcgccatccgtcctgatttgtgcctgagcagcgatttcatcgtcggcttccccggcgagaccgaacgcgagttcgagcaaaccttgaaactggtgaaagacatcgccttcgacttgagcttcgtgtttatttacagtccgcgccccggcacgcctgccgccaacctgccggacgacacgccgcacgaagaaaaagtgcgccgcctcgaagccttgaacgaagtcatcgaagccgaaaccgcgcgcatcaaccaaaccatggtcggcacggtacaacgctgcctggtcgaaggcatctccaaaaaagaccccgaccaactgcaagcccgtaccgccaacaaccgcgtcgtcaacttcaccggcacgcccgacatgattaaccaaatgatcgatttggaaatcaccgaggcctacaccttctccctgcgcggcaaagttgtcgaagcctaaaccctcacgccgaaaaaatgccgtctgaagcgtttcagacggcattttgccttgtatcggcagacgacggcgcggccgggcggcttaatttgccgcatcccgatccgacagccacgcgcgcacacgccgttccaccgcttcggcactcaagcccaaatcgtctaaaagttttttcggatcgccgtgtccggttacggtatcggcaacgcccaaaagcaaaacgggtttgcagatgccgtgtttcgccaatacttccagcaccgcgccgcctgcgccgccctgttcggcgttttcttcaagggtaacgatgcggtcgtggcttcgggcaaggcggacaatcaactcttcgtctatcggtttgacgaagcgcatatcggcgacggtggcgttcagtttttcggcaaccgccaatgcgggggcgaccatactgccgaaggcaatgaatgcggttttctcaccttcgcggcggataatgcccttgccgatttccacggtttccatgccgtctgaaaccggcgcgcccgtacccgtgccgcgcggatagcggacggcggcgggcgcgtctgcctgatagcaggtcgaaagcaacaggcggcattcgttttcatcgctcggcgcggcgacaatcatgttcggcacgcagcgcaaaaagctcaaatcgtacagaccggcatgggtcgggccgtccgcgccgacgatgcccgcgcggtcgacggcaaacaaaacgggtaggttttgcagggcgatgtcgtgcaccagttggtcgtaggcgcgttgtaaaaaggtggaataaatcgccacgacgggcttcatcccttcgcaagccaaaccgccggcaaaggtaacggcgtgctgctcggcgatgccgacatcgaaatagcggtcggggaatcgttgttcaaactcaaccaagccgctgccctcgcgcatggcgggggtaatcgcaaccagtcgggaatctgccgccgcccggtcgcacagccatttgccgaacacttgggtataggtcggtttggcggcgggcttgggttctttttcagacggcatttgcgccgcgctttctttaggcaggttggcgacggcgtggtatttgacggggtcgttttcggcgagtttgtagccgttgccctttttggtgatgacgtgcagcaactgagggcctttgcggctgcgcaagtctttcaatacgtccaccagattttcgacgttgtgtccgtccacggggccggtgtagcggaagccgaagttttcaaacaaagacagcgactgtttggcgtgttcggcttcttcggcaagggttttgattttgtgttcgactttttgggcaaactccatcgcgccgggtattttgtctaataccttgcccgtttgcgctttgacggtactcaacaggccgtgcatatcgcgcacgacgttgctggcaaggtatttcggcagcgcgccgacgttgggggaaatcgacatttcgttgtcgttgaggacgaccagcaaatccacatccatatcgcctgcgcaattcaaggcttcaaacgcctgccccgccgtcatcgcgccgtcgccgatgatggcgacgctgcggcggtcgctgcccaagagtttgtctgccgccgccatgcccaacgccgcgccgatggaggtggaggaatgccccacgccgaacgcgtcgtactcggactcgcaacgtttcggaaaacccgccaaaccgccatattggcgcatggtgtgcatctggtttttcctgcctgtcaggattttgtgcggatagctttggtgtccgacatcccacaccagcttgtcttcgggcgtgtcgtacacatagtgcagggcgatggtcagttcgaccgcgcccaaattgctggcgaaatgcccgccggtctgcccgacagattccagcagaaaggtgcgcaactcgccggcaaggcgcggcagctgttttttgtccagacggcgcaaatcttgcgggctgtcaatcaggtcgagtagggggcttgggttcatggtgtgtcttttttatgtgtcgtccgggtgcaacggtcaattatatatcaagagcgtgcggctgacggctgattttgccgtatgtcattcgtcctgccgcttggcgcgcgggtgggcttcgtcatacaggcgggcgatgtggtcgaaatcgagcttggtataaatctgcgtggtcgaaaggctgctgtgcccgagcagctcctgcaccgccctgatgtcgcgcgaagcctgcaataggtgtccggcgtagctgtggcgcatcatatgcggcgaaacgtgcctgccgtcgccgttttgcgccgcccattgcgccaaacgtttttggatttggcgttggctcaggcgcgtgccgttcctgccggtaaacagggctttgccgtccgatgccgtctgacgcagcggcagatagtttttcagggcttccacgcttttgccgaccagcggcacctgccgctgcttgcgccctttgccgataacgtgtacccacgcctcgtccaaatagacatcatctgcattcaagccgtgtatctcgctcacgcgcaaaccgctgccgtacatcagttcgaacagggcgtggtcgcgcaccgccagcgggtcgccgccgtccacgggcaaatccagcatccggttcagccattcctgcggcagggctttgggtacgcgctcgggctgcttcggcggtttgatgtcggcggtcgggtcggcgtgcatcaggccgcgctttaccagccaaacgcaatactgccgccaagacgaaagcttgcgagccagcgtccgttcccccaaaccgcggccggacagccggcgtaatgcctgtacgaagtcgccgcgagtgcaatttgaagggtttgcagacggcatttcttccagaagggcaagcagttcctgcaagtcgcgccggtatgcggcaaccgtgtgctccgatttaccctcgcgcacgatattttccaaataagcgtccaagtatgccgcaagtccgtccaaacccattcccacacctaaaataacattagaaacattatcataaatcggaatatccgaatcccgaaacgtcaaaacccgacaaacctgcatactggcatcgttaatataaaatcaatgagctgtttatggttttttgctgtaaaaaacattataatccgccttatttacctattgcccaaggagacacaaatggcactcgtatccatgcgccaactgcttgatcatgctgccgaaaacagctacggcctgccggcgttcaacgtcaacaacctcgaacagatgcgcgccatcatggaggctgcagaccaagtcgacgcccccgtcatcgtacaggcgagtgccggtgcgcgcaaatatgcgggtgcgccgtttttacgccacctgattttggcggctgtcgaagaatttccacacatccccgtcgtcatgcaccaagaccacggcgcatcacccgacgtgtgccaacgctccatccaactgggcttctcctctgtaatgatggacggctcgctgatggaagacggcaaaaccccttcttcttacgaatacaacgtcaacgccacacgtaccgtggttaacttctcccacgcttgcggcgtatccgttgaaggcgaaatcggcgtattgggcaacctcgaaaccggcgaagcaggcgaagaagacggtgtaggcgcagtgggcaaactttcccacgaccaaatgctgaccagcgtcgaagatgccgtatgtttcgttaaagataccggcgttgacgcattggctattgccgtcggcaccagccacggcgcatacaaattcacccgtccgcccacaggcgatgtattacgtatcgaccgcatcaaagaaatccaccaagccctgcccaatacacacatcgtgatgcacggctccagctccgttccgcaagaatggctgaaagtcatcaacgaatacggcggcaatatcggcgaaacctacggcgtgccggttgaagaaatcgtcgaaggcatcaaacacggcgtgcgcaaagtcaacatcgataccgacttgcgccttgcttctaccggcgcggtacgccgctaccttgccgaaaatccgtccgactttgacccgcgcaaatacctgagcaaaaccattgaggccatgaagcaaatctgcctcgaccgttatcttgcgtttggctgcgaaggtcaggcaggcaaaatcaaacctgtttcgttggaaaaaatggcaagccgttatgccaagggcgaattgaaccaaatcgtcaaataacaggttgcctgtaaacaaaatgccgtctgaaccgccgttcggacgacatttgatttttgcttctttgacctgcctcattgatgcggtatgcaaaaaaagataccataaccaaaatgtttatatattatctattctgcgtatgactaggagtaaacctgtgaatcgaactgccttctgctgcctttctctgaccactgccctgattctgaccgcctgcagcagcggagggggtggtgtcgccgccgacatcggtgcggggcttgccgatgcactaaccgcaccgctcgaccataaagacaaaggtttgcagtctttgacgctggatcagtccgtcaggaaaaacgagaaactgaagctggcggcacaaggtgcggaaaaaacttatggaaacggtgacagcctcaatacgggcaaattgaagaacgacaaggtcagccgtttcgactttatccgccaaatcgaagtggacgggcagctcattaccttggagagtggagagttccaagtatacaaacaaagccattccgccttaaccgcctttcagaccgagcaaatacaagattcggagcattccgggaagatggttgcgaaacgccagttcagaatcggcgacatagcgggcgaacatacatcttttgacaagcttcccgaaggcggcagggcgacatatcgcgggacggcgttcggttcagacgatgccggcggaaaactgacctacaccatagatttcgccgccaagcagggaaacggcaaaatcgaacatttgaaatcgccagaactcaatgtcgacctggccgccgccgatatcaagccggatggaaaacgccatgccgtcatcagcggttccgtcctttacaaccaagccgagaaaggcagttactccctcggtatctttggcggaaaagcccaggaagttgccggcagcgcggaagtgaaaaccgtaaacggcatacgccatatcggccttgccgccaagcaataaccattgtgaaaatgccgtccgaacacgataatttaccgttcggacggcattttgtattgcaccgtccgacggcatgcccaaggggggaaatccctattttcaggccaaccgctatataatgccgtctgaaccaacgagagaatgccatgcaagctgattttaaccgtcccgtcctggccgtcgataccggtacttcccgtttgtcgctcgcgctgcgtgccgacggcgaaacccgtctgttccatcaggaagtcggcagccgccagtccgaactgattctgccggaaatccgcaccctattccgcgatgcaggcattaccgccgccgatttgggtgcggtcgtgtacgcacagggtcccggcgcgtttaccggactgcgtatcggcatcggtgtagctcagggtttggcaacgccgtttgatacccccttaatcggcgtaccctcgctcgatgccgccgcctcgctgccgccgccgcaaagctgcatccttgccgctacggacgctcgtatgggcgaagtgttttatgcatggttcgatacgctgaactgccaccgtttgagcgattatcaggtcgggcgggcggcagacatccggctgccggagggatgcgccttttcagacggcataggcagcgcgttcgcgctggaagaagctccgccgttctcaggcagaccggatatgccgactgccgccgactttctcgcattggcagccaagggcggttatcctgccgtccatgccgcacacgccggtttgctctacgtccgcaacaaaatcgccctgactgccaaagaacaggccgaacggagagcgcgcccgtgaacatccgccgtgccgtttgtgccgattgtgaggagctggccgcactcgatgccgtctgcaacccgtccgcatggacgcaacgccaatttgagtccgcactggtttcgccgtccgaacaggttttccttgcggaaaaagacggcgggattgccgcctttatcgtttggcagaacctgcccgacgaatccgaactgcacctgattgccaccgcgcccgaatgccgccgccaaggaattgcgtccgccctgctcgaatattggttcacacatctgcccgaagacacgcaacgcctgctgctcgaagtccgtgcaggcaacaccgccgcacaggcactgtacacggcgcacggcttcagcattacgggcaggcggaaaaactattaccgtacagccgacggtaaaaccgaagatgccgtcttaatggagaaaatatgttaagcgcgcgctacctccacctgcacgaagctttgggtttgggtccgatgtggctgaaacaggccgccgccgtcctgccgcccaaaaacacacccgcaccctcggcacaggcacgtccccaaaccgtccgcgccgccccgatccgcccttcccaaccccataacggtcaggcgcggctcgaaacgatgaaagcgttggaaaccgccgccgtacctacgcgcaaacccgcgcctgaaaccgaaacgcctctgcccggcctttcagacggcatcgcccccgttcccgccgcttcgggcatcaccaagcttgccgtcgtcagcctttgcccaccgatcgaggatgcggtttacgggcaactgttccacggcaaagcaggcatcctgctcgacaacatactcaaagccgtaggactggatgccgcctatgtccacaaaacctgttgggtgaaaaccgccgccgtcggcaacccgatgccgtctgaacaggccgtcgcgaatgcgctgggtcaaatcgcccgcgaactcgacggctgccgcgccccggctgtccttttcctcgggcaggcttttgtccagcctgaacggcaaacgatgattgaaactttgtgcggcagccgtcccttcttcatcatcgaccatcccgcccggcttttacgccaacccgaactcaaagcccgcgcctggcaggtgttgaaacagttgaaacgcgccttgcggcaaggcggcggcagttgaagcgcgccgcacggggcggtagaatcgcaactgcgtcccaatatctgacagaaagcacaaaatgaccgatttccgccaagatttcctcaaattctccctcgcccaaaatgttttgaaattcggcgaatttaccaccaaggcaggacggcggtcgccctatttcttcaatgccggcctctttaacgacggcttgtccacgctgcaactggcaaaattttacgcacaatccatcattgaaagcggcatccgattcgatatgctgttcggtcccgcctacaaaggcattattttggcggcggcaaccgcgatgatgctggcggaaaaaggcgtgaacgtcccgtttgcctacaaccgcaaagaagccaaagaccacggcgaaggcggcgtgttggtcggcgcgccgcttaaagggcgcgtgctgattatcgacgacgtgatttccgccggcacatccgtacgcgaatcgatcaaactgattgaagcggagggtgcaacccccgccggtgtcgccatcgcgctcgatcgcatggaaaaaggcacgggtgaattgagcgcggttcaggaagtggaaaaacaatacggtctgcccgtcgcccccatcgccagcctgaacgatttgtttattctgttgcaaaacaaccccgaattcggacagttcctcgaacccgtccgagcctaccgtcggcagtacggcgtagaataaaaacaaagcatatgccgtccgaaccgccttacgcctcagacggcatcaaacctgacacacacgaggaaataccatgcccgcctgtttctgcccccactgcaaaacccgtctctgggtcaaagaaacccaactcaatgtcgcccaaggcttcgtcgtctgccaaaaatgcgaaggactgtttaaagccaaagaccatctggcaagcacgaaagaacccatattcaacgatttgcccgaggctgtttcggatgtcaaactcgttcaccgtatcggcacgcgcgccatcggcaagaaacagatttcccgtgacgaaatcgccggcatcctcaacggcggtacaacccagcccgatattccgcccgcaaccgccgccacccctgctgccgcaccgcaggttaccgtaccgcccgccgcgcccgcccgtcaggatgggttcaactggacgattgcaaccctgtttgcccttatcgtcctcattatgcagctttcctacctcgtcatcctatgagcgcgcccgacctctttgtcgcccacttccgcgaagccgtcccctacatccgccaaatgcgcggcaaaacgctggtcgccggcatagacgaccgcctgctcgaaggtgataccttaaacaagctcgccgccgacatcgggctgttgtcgcaactgggcatcaggctcgtcctcatccacggcgcgcgccacttcctcgaccgccacgccgccgctcaaggccgcacgccgcattattgccggggcttgcgcgttaccgacgaaacctcgctcgaacaggcgcagcagtttgccggcaccgtccgcagccgttttgaagccgcattgtgcggcagcgtttccgggttcgcgcgcgcgccttccgtcccgctcgtatcgggcaacttcctgaccgcccgtccgataggtgtgattgacggaaccgatatggaatacgcgggcgttatccgcaaaaccgacaccgccgccctccgtttccaactcgacgcgggcaatatcgtctggctgccgccgctcggacattcctacagcggcaagaccttctatctcgatatgcttcaaaccgccgcctccgccgccgtctcgcttcaggccgaaaaactcgtttacctgaccctttcagacggcatttcccgccccgacggcacgctcgccgaaaccctctcggcacaggaagcgcaatcgctggcggaacacgccggcggcgaaacgcgacggctgatttcgtccgccgttgccgcgctcgaaggcggcgtgcatcgcgtccaaatcctcaacggagccgccgacggcagcctgctgcaagaactcttcacccgcaacggcatcggcacgtccattgccaaagaagccttcgtctccatccggcaggcgcacagcggcgacatcccgcacatcgccgccctcatccgcccgctggaagaacagggcatcctgctgcaccgcagccgcgaatacctcgaaaaccacatttccgaattttccatcctcgaacacgacggcaacctgtacggttgcgccgccctgaaaacctttgccgaagccgattgcggcgaaatcgcctgccttgccgtctcgccgcaggcacaggacggcggctacggcgaacgcctgcttgcccacattatcgataaggcgcgcggcataggcataagcaggctgttcgcactgtccacaaataccggcgaatggtttgccgaacgcggctttcagacggcatcggaagacgagttgcccgaaacgcggcgcaaagactaccgcagcaacggacggaactcgcatattctggtacgtcgcctgcaccgctgaccgcaacggaaagccgccgcagaaatgccgtctgaaccccgtttcagacggcatttccccgattatatagtggattaaatttaaatcaggacaaggcgacgaagccgcagacagtacaaatagtacggcaaggcgaggcaacgctgtactggtttaaatttaatccactataaagacctgcccaaccctcaaggaccccgatgaaatcctaccccgacccctaccgccattttgaaaacctcgattccgccgaaacgcaaaacttcgctgctgaagcgaatgccgaaacgcgcgcgcgttttttagaaaacgacaaggcgcgcgcgctttcagacggcattttggcgcagttgcaggacacgcggcagattccgttttgtcaggaacaccgcgcgcggatgtaccatttccatcaggacgcggagtatccgaagggcgtgtaccgcgtgtgtaccgcggcgacgtatcgttccggctatcccgagtggaaaatcctgttttcggtggcggatttcgacgaattgcttggcgacgatgtgtatttgggcggcgtgtcgcacttggtggaacagcccaaccgcgcgttgttaacactgagcaaattgggcagcgatacggcgtacacgctggaagtggatttggaagcaggggagttggtcgaaggcggttttcactttccggcaggcaaaaaccatgtgtcgtggcgcgatgaaaacagcgtgtgggtgtgtccggcttggaacgaacgccagttgacccaatcgggctatccgcgcgaagtatggctggtggaacgcggcaagagtttcgaggaaagcctgcctgtgtatcaaatcggcgaagacggcatgatggtgaacgcgtggcgttatctcgatccgcagggttcgccgattgatttgattgaagcgtcggacggtttttacaccaaaacctatttgcgggtctcagccgaaggcgaggcgaaaccgttaaacctgcccaacgattgcgacgtggtcggctatctggcggggcatcttttgctgacgctgcgcaaggactggaaccgcgcgaaccaaagctatccgagcggcgcgctggtggcggtgaagctgaatcggggcgaactcggggcggcgcagcttttgtttgcgcccgatgaaacgcaggcattggaaagcgtggaaacgaccaagcgttttgtggtggcgagcctgttggagaacgtacaaggccgtctgaaagcatggcggtttgccgacggcaaatggcaggaagtcgaattgccgcgcctgccttcgggcgcgttggaaatgaccgaccaaccttggggcggcgacgtggtttaccttgccgccagcgatttcaccacgccgctgacgctgtttgcgctggatttgaacgtgatggaactgaccgtcatgcgccgccagccgcagcagtttgattcagacggcattaacgtgcagcagttttggacgacttcggctgacggcgagcgcattccttatttccacgtcggcaaaaacgccgcgcccgacatgccgacgctggtctatgcctacggcggtttcggcattcccgaattgccgcattatctgggcagcattggcaaatattggctggaagagggcaatgcctttgtattggcgaacatccgcggcggcggcgagttcggcccgcgctggcatcaggcggcgcagggaatcagcaaacataaaagcgttgatgatttattggcagtcgtgcgcgatttgtccgaacgcggtatcagttcgcccgaacacatcggcttgcagggcggcagcaacggcggactgattactgccgccgccttcgtgcgcgaaccgcaaagcatcggcgcgctggtgtgcgaagtgccgctgaccgacatgatccgttatccgctgctctccgccggttcaagctggacagacgaatacggcaatccgcaaaaatacgaagtctgcaaacgccggttgggcgaattgtcgccgtatcacaatctttcagacggcatcgattatccgcccgcgctcattaccaccagcctgtccgacgatcgcgtccatcccgcccacgcgctcaagttctacgccaaactgcgcgaaacctccgcgcaatcttggctctactcgcctgacggcggcggccataccggcaacggcacccaacgcgaatccgccgacgaactcgcctgcgtcttgctgtttttgaaagagtttttgggctaagggcgggggagcggcactgccgccgcgaatgaaaaaaggtcgtctgaaactgctttttcagacgaccttttttaatggttgtttcaaatcaaaatatctatgccgccggccccatcagcacttcttcacatccgaaggcaaaaatccgtaatgccgtctgaacgcttcgttgaaccgtcccgcgtggcggtagccgcaaaagtgcatggcggcttggacggtgctgccggattcgatgagggcgagcgcgtgttccagccgcaggcggcgcaggcatccggcgacggtttcgccggtttgcgctttgaaatagcgtttcaggtagcattcgttcagtccgacgcggcgggcgatttcggcgatggtcagcggacgggcgaattcgtgttgcaggatgtcggcggcttcgtctatgcgccgacggcggtaaccgttgtcgtggcggcggaaggtgaagcgcaataatcgggcggagagttccagcgcggcggcttcgtcggcaagcaggccgaagccgtccgattcgaacgggcgttgcagcagtgggcaggccgccgccgtcagtgccgctgcgttttgcgccagccgttgcagggcgaatcggcctattgtttgcggcgaaaacaggcgttcgtccagcaagccttcgtcgtgccagcggcgcagtttttccagcgaaaaatccaaatgcagcgcgcacatgccgctgttgtcgggcagcagggtttcggatacgtccgccaaatcgccgcgtaccagtcagatttcgccggcagatgggcggtattccctgccgcccatttgtaaccggttctgccccgacaccatgacgaacaaggcgcagttgtggctgaaattgtggatttcggtgggaaacgcgcccgttccgccgccgcgcatccgcgacaaggtgatgcccgaatcgaagcggttgatgcacatttccagatgcaaaccgggctgttttgcctgcgcaatgagcgcgctgtcggaacagccgtccaacgcccagccggatttatcggagcggacataggtttggtactggcggtagatggcggcggtgttcatgattggataggaacgagttgtctaacaaatgaattaaataggaattattaccaataatcaagcgcagggattggttgaaacggaaaaggtcgtctgaaagggtgtttcagacgaccttttccgtatcgggaatttgttttgccgtatcgggaattttgcgttttgcggcgtggtttctgcaggttgtttgcttaataataaacattcttattcgtatgcaaaggaaccgcacaccgtgaaaccgcgtttttattgggcagcctgcgccgtcctgctgaccgcctgttcgcccgaacctgccgccgaaaaaactgtatccgccgcatccgcatctgccgccacgctgaccgtgccgaccgcgcggggcgatgccgttgtgccgaagaatcccgaacgcgtcgccgtgtacgactgggcggcgttggatacgctgaccgaattgggcgtgaatgtgggcgcaaccaccgcgccggtgcgcgtggattatttgcagcctgcatttgacaaggcggcaacggtggggacgctgttcgagcccgattacgaagccctgcaccgctacaatcctcagcttgtcattaccggcgggccgggcgcggaagcgtatgaacagttagcgaaaaacgcgaccaccatagatctgacggtggacaacggcaatatccgcaccagcggcgaaaagcagatggagaccttggcgcggattttcggcaaggaagcgcgcgcggcggaattgaaggcgcagattgacgcgctgttcgcccaaacgcgcgaagccgccaaaggcaaaggacgcgggctggtgctgtcggttacgggcaacaaggtgtccgccttcggcacgcagtcgcggttggcaagttggatacacggcgacatcggcctaccgcctgtagacgaatctttacgcaacgaggggcacgggcagcctgtttccttcgaatacatcaaagagaaaaaccccgattggattttcatcatcgaccgtaccgccgccatcgggcaggaagggccggcggctgtcgaagtattggataacgcgctggtacgcggcacgaacgcttggaagcgcaagcaaatcatcgtcatgcctgccgcgaactacattgtcgcgggcggcgcgcggcagttgattcaggcggcggagcagttgaaggcggcgtttaaaaaggcagaacccgttgcggcggggaaaaagtagggagtcgtctgaaaacggagcttccgaaggaagcggggggtttctgcgaagctaaagtgcggtttcaacgaattgaaaagcagcctgtatgttgaaaataccgctcaagcaaacctacggtttgccgccctctccctagccctctcccacagggagaggggattgggttgcaggctgcctttaaggtttaggcaaatttttaacttcgttgaagctgcgatttcagaagctccgttttagcttcgcagaaactccgcttccttcgaaagctccgttttcagacgaccttttggagtaccgcaggcacacgcatcgaacggctgaatcaaagattcagaccgatggcagtccgcacccgagtttatgcggcaaacagcgaggctacggcaacccgccccctctccctgtgggagagggttagggagagggcggtaagccgcaggcttacatcaaagccgataacgcttccgttacaactccgcccactgaaagcagcctgcaacgaagccaaaacgacaaaccgcatcgtaaaccacccaacccataggagaaccccatgcaaaacgaaaccatcaacctgaaacagcaccttgccgccatcaaagaatactggcagcccgaaatcatcaaccgccacgggttccaattccacttggtcaaacttttgggcgattacggctggcatacgcacggatacagcgacaaagtgctgtttgccgtggagggcgacatggcggtggacttcgccgacggcggcagcatgacgatacgcgagggcgagatggcggtcgtgccgaagtcggtgtcgcaccgcccgcgttcggaaaacggctgctcgttggtgctgattgagttgtccgacccgtccgaggccgtctgaaaacgaagtttccgaaggaagctgagtttctgcgaagctaaaagcagcctgcaccttcaatcaatatgccgaaaatacaaccccaccgcacaccaacacacaaaggaaatcccatgacacgcttcaaatattccctgctgtttgccgccctgttgcccgtgtacgcgcaggccgatgtttctgtttcagacgaccccaaaccgcaggaaagcactgaattgccgaccatcaccgttaccgccgaccgcaccgcgagttccaacgacggctacactgtttccggcacgcacaccccgctcgggctgcccatgaccctgcgcgaaatcccgcagagcgtcagcgtcatcacatcgcaacaaatgcgcgaccaaaacatcaaaacgctcgaccgcgccctgttgcaggcgaccggcaccagccgccagatttacggctccgaccgcgcgggctacaactacctgttcgcgcgcggcagccgcatcgccaactaccaaatcaacggcatccccgttgccgacgcgctggccgatacgggcaatgccaacaccgccgcctatgagcgcgtagaagtcgtgcgcggcgtggcggggctgctggacggcacgggcgagccttccgccaccgtcaatctggtgcgcaaacgcctgacccgcaagccattgtttgaagtccgcgccgaagcgggcaaccgcaaacatttcgggctggacgcggacgtatcgggcagcctgaacaccgaaggcacgctgcgcggccgcctggtttccaccttcggacgcggcgactcgtggcggcggcgcgaacgcagccgcgatgccgaactctacggcattttggaatacgacatcgcaccgcaaacccgcgtccacgcaggcatggactaccagcaggcgaaagaaaccgccgacgcgccgctcagctacgccgtgtacgacagccaaggttatgccaccgccttcggcccgaaagacaaccccgccacaaattgggcgaacagccgccaccgtgcgctcaacctgttcgccggcatcgaacaccgcttcaaccaagactggaaactcaaagccgaatacgactacacccgcagccgcttccgccagccctacggcgtagcaggcgtgctttccatcgaccacaacaccgccgccaccgacctgattcccggttattggcacgccgacccgcgcacccacagcgccagcgtgtcattgatcggcaaataccgcctgttcggccgcgaacacgatttaatcgcgggtatcaacggttacaaatacgccagcaacaaatacggcgaacgcagcatcatccccaacgccattcccaacgcctacgaattttcccgcacgggtgcctacccgcagcctgcatcgtttgcccaaaccatcccgcaatacggcaccaggcggcaaatcggcggctatctcgccacccgtttccgcgccgccgacaacctttcgctgattttgggcggacgatacacccgttaccgcaccggcagctacgacagccgcacacaaggcatgacctatgtgtccgccaaccgtttcaccccctacacaggcatcgtgttcgacctgaccggcaacctgtctctttacggctcgtacagcagcctgttcgtcccgcaatcgcaaaaagacgaacacggcagctacctgaaacccgtaaccggcaacaatctggaagccggcatcaaaggcgaatggcttgaaggccgtctgaacgcatccgccgccgtgtaccgcgcccgtaaaaacaacctcgccaccgcagcaggacgcgacccgagcggcaacacctactaccgcgccgccaaccaagccaaaacccacggctgggaaatcgaagtcggcggccgcatcacgcccgaatggcagatacaggcaggttacagccaaagcaaaacccgcgaccaagacggcagccgcctgaaccccgacagcgtacccgaacgcagcttcaaactcttcactgcctaccactttgcccccgaagcccccagcggctggaccatcggcgcaggcgtgcgctggcagagcgaaacccacaccgaccctgccacgctccgcatccccaaccccgccgccaaagcccgcgccgccgacaacagccgccaaaaagcctacgccgtcgccgacatcatggcgcgttaccgcttcaatccgcgcgccgaactgtcgctgaacgtggacaatctgttcaacaaacactaccgcacccagcccgaccgccacagctacggcgcactgcggacagtgaacgcggcgtttacctatcggtttaaataaggtcgtctgaaaacggagtttctgcgaagctatagtggattaacaaaaaccagtacggtgttgcctcgccttagctcaaagagaacgattctctaaggtgctcaagcaccaagtgaatcggttccgtactatttgtactgtctgcggcttcgtcgccttgtcctgatttttgttaatccactataaaagcagcctgcacattgaaaatgccgcccaagcaaactttcagtttgcccgcctcgtcctagccctctcccacgggagaggggattggggtgcaggctgcctttaaggttcaggcaaattttaacttcgttgataccgcgctttagcttcgcagaagctgcactttcagacgaccttttggaacaccacaggtacacgcatttaaggaatgccgtctgaaatgcctgcctcaataacgcatcatgttgccgtcaatctcggccgcccatgcatcgatgccgccctgaaggttgtacaggttttcaaaacccgcgtccgccaaatacatcgccgtatgcaggctgcggataccgtggtggcaatacaccacaagcggcacatcatccggcagctcgttctgccgcagcggaatcagattcatcgggatatgcagcgcatttggcagcgaacaaaccgccgtttcttcatccgtacgcacgtccaacaaacaaaacatccgcccttcgtccatccacgctttcaattccgcgggcccaagttgcacaatatccatcgcaccccccaaaaaaaaccaagcaaaatgccgtctgaagccccaaacccgctttcagacggcatgacctgtcaacatcttaaaaatcgaaaccgccaaacggatcggcatccttatcatccaaatgcgccaccaaggtatcgaacagcaccttctcttcaaacacatcgcccctgcgcgtaatcaaaagcgcgcgttgaacaggcttgcgacctacgataaccaccatgcgtccgccatctttcaactgttctttcaacacttcaggcacaaggtttaccgcaccgccgacataaaccgcatcaaacggcgcacctgcggaaagttcggtcaacccgttgttttgcacataatcgatattgtccaaacccaagccgtccaacaccgctttggcgcggttttgctgttcgacatcgatgtcgtccgacaccacacgaccagccaattttgccaacagcgcggtcgcatagcccgaacccgtgccgatttccaaaaccgtatcgtttttcgtcagcttcaagccctgcgccagccgcgccacgactttcggctcgagcatcttatgaccgttggcaagcggcagcgccatatccgcatacgccaaaccctgcaagtcctcatcgacaaaaagctcgcgcggaatctccgccaaagcgtccaacacatcaaaatccaatacatcccacggacggatttgctgttcgaccatattgaaccgcgctttttcaaaatccatttagtgctccgtcaaataattgttccaacaatggcaggcattataaaaccacactcccgccgcgccaacttcggcacgcgccgacagcccgttttgtcagtctcaaaccgcctgacgcgaagcctcaaaccgcttctccaaaatcttcgccagttcgcccaaatacaaagcatccgtctcatcaaactgcgccaaatgttcgctgtccgcgtccaacacgccgatacagcggccgtctgaaaacagcggcacgacaatctccgaacgtgacaaagacgaacaggcaatatggtcgggatgcgcgttgacatccttaacaaccaccgtttcacccttcgcccaagcctgaccgcacaccccgcgaccgaacggaatccgcgtacacgccaaaggcccctgaaacggtgccaaaaccaattcgtccgaacgcgtatcgaccaaataaaaacccacccaaaaccaaccgaacgcctccttcaaaaccgccgccgtgttcgccaaattcgccacccaatccgcctcgtcagccaccacagactcaatctgcggcaacacctcccgataaagcgcggccttgtccgaagccgaaaaatgaagcgcgtgcatcacatctcctatagttgcatacatatcaggcggccattataaaacagcctgcccgaaacaacattccaaaccgcccggccggccgcttcaagttgcgaacccgccgcatatccactaaacttcacgttgcaccgcgccacacgcggcagacaaaaaaacacgacacggagcaaaaaagatgtatcgccaaatcggaatgtgggatcaaaaatgggtcatcggcaactggaaaatgaacggccggctccaaaacaacaacgcactgatgcaccgcttccgcatccaccccaccgccgaacgcgtcctcatcggactcgccgccccgaccgtttacctgctgcaactgcacaacgccatgcaaatcgttttaaacaaccgcatcctcacctgcgcccaagacgtgagccgcttccccaataacggcgcgtacaccggcgaagtgtccgccgaaatgctcgccgacaccggcacagacatcgtcctcatcggacactccgaacgcagcctttatttcggcgaaaaaaacgaaatccaacgccgcaaaatggaaaacgtcctcaacgtcggactcatcccgttattgtgcgtcggcgaaagcctcgaagagcgcgaagccggcaaagaacacgaagtcatcgcccatcagctttccatcctgcaagggctggataccaaaaacatcgccgtcgcctacgaacccgtctgggcgatcggcaccggcaaagtcgccaccgtcgaacagattgccgatatgcacgcattcatctacaaagaaatcttgtctttgtgcggaagcgatgttaaaatccgcgtcctttacggcggaagtgtgaaagcggacaacgcggccgacatcttcgcagtaccttatgtggacggcgcactcgtcggcggcgcgtcattgtcgtacgactcctttaccgccatcatcagtgccgcacaaaatgcgtagaaaaatatggaagccttcaaaaccctaatttggattgttaatataatttccgctttggccgtcatcgtgttagtattgctccaacacggcaaaggcgcggatgccggcgcgactttcggatcgggaagcggcagcgcgcaaggcgtattcggctctgccggcaacgctaacttcctcagccgctcgaccgccgttgcagcaacatttttctttgcaacctgcatggctatggtgtatattcacacccacacgacaaaacacggtttggacttcagcaacgtacaacaaactcagcaagcacccaaacccgtaagcaataccgaaccttctgcccctgttcctcagcagcagaaataacagtttttcaaatgccgacatggtgaaattggtagacacgctatcttgagggggtagtggccgtaggctgtgcgagttcaaatctcgctgtcggcaccaacacacaaaaacgcctgaaaatttcaggcgttttttgttcaatcccatccaacgctgtcaaccaattccaatcaatacaaggatttcaggctgattgttatcctgccgtcccccttcctgacagtgcaatcccgtccaatccgccctaattgaagtaacctaaaatttacggtatcttttgcggtatctgaaaaatacctcgaaaaaataccgcaaaaataaagctgaacgaccgccaaatcaggaatgccaagcggaaaagagcttgcggggaatactgccaagacgtagggaacaagggggaaaccgtccaagatgcagggcggttttttttgggtttttggaaaaaacctatactaggaagcgatacccttagttgttaccttgttaccggggaaaagttagataaataagcatatgaaatatagtgaattaaatttaaatcaggacaaggcggcgagccgcagacagtacaaatagtacggcaaggcgagccaacgctgtaccggtttaaatttaattcactataaaataagaaaaagataaaaaattggtaacaaatgcggtaacaaatggtaacgaatcggtaacaacttttggggttttccggtttttcaccgtcttggcagtgggagcgtagcggaatgaaaagccaaaacgcacggaaccgcgcctattttgagcaggaatggcggttaaaccgcttggttatatacggggaataggaagacagcgaaacgcgctaaaaacgcaatttgagccattaaaagcgattgattaaaaaaataatcaggttagccgccagtgtttcaggcggcataaacggagaaattgcggggcataaaaaaggcagcttgccgtgttgtctgtctctggtataattccaagtatcactaatcaacggctacacaatgcggatattcaaaaaccaatggatagtgaaatttgccaagaagcacaaaatcaacgattccgagctgctggaagcggtagagcgggcggataacgggctgatagacgcagatttaggcggcggtgtgattaagcagcgcatagcaaggcaaggacaaggcagaagcggcggttatcgcagtctgatactgttcaaacaggcagacaaggcattttttgtttacgcctttgccaagaacgacagggaaaacatttcggataaagaacttgacgtttaccgaaaagccgccgcatattatctgaaatacacgcgggcagagctggcggctttgaaagaagacggcattatcacggagatagaatcatgaaatacaaaaacgaggcattagccgccattcatgaaatgatggaaggggcttacaacatcggcgcaatcgacaaaaagaccatgcgcgactttgacaagtcctgcctgaccgaaatcaaaccgttgagcggcggagacatcaaggcaatcagggagaaggaggcactatcgcaagccgctttcgccatctatctcaacgtgggaaaaaatcacgtttcggcttgggagcggggcgttaaaaagccgagcggcgcggcgttgaagctgctgaccatcgtcaaaaacaagggcatcgaagccattgcgtagccgacttggcaaacggcaaaatcagcaagttcacaatagacgcgctgctgaatatgcctgccaagacaggcaagaccgccgaactgaatatcagggcgtagccgcataaatgcccgaccgcatcaaaccaagccgaaacggcggcggtgcagacgacatagcccgacagcaaggcacggcgcagacgggcgcgaaacccgaaacatcaccgaccgcgaggtacggggattttttgcgcccgttgcagggggggattggatttaagcggcgcgggcttgaaggcaaaacgggtggggcacagaactgtttaaatgcagtctgaatctcaaacgatttcagacggcattttgaaacaatggctcaaattctcgatccccttcccttaacgccgacgttttttattaacgcgccccttatttctgacactttgctcataaaccggcataacggtcggcaacaaccgttttagattttctatacgggcattgtttgtcggatgagtagaggtaatagcataaataaagccgttttggtcgttttcctgattcattttttcccaaaccctgacagcggccgccggatgatagcctgcctgcgccatcaacatcattcccccctcatcggcttcttcttccaagctgcggctataaggcaaggtaagaccgtacgtccccaaaatatccatacccaatccgaccaattccggattagtatccggttttttgtctaatataatctgcgtgcctatctgcgccgccgtattggtcaagatttgctgcccgaccttatttttaccgtgttcatgcagggcgtgcgtcatttcatgccccataatggcggcaatttcgtcatcggtcagcttgagtttgtcgactatccccgtataaaacgccatttttccaccgggcattgcccacgcgttcagctcatcgtttttgaaaaccgtcattttccagtcaaacttatggctggtattatttgccgcatcggcataaggcagcatacgtcgaaatactgcctgcaccctgcgggctgttctggatgtggtatcgacattgccggcagacttgtttaactcaaccgttttcatataatctttggcagccgcagcgttcattgtggcggaatcatgaccgtaaacatcagcaacgaccgcacaagcccccaataccgagattactgccgacaggcagagtatccgtttaaaggaaggaaggaaggaaatttcatatttaggtttactccttaaaaaattaaatttcaaaaaaatgccgtctgaatccaaaacggatttcggacggcatcttaacattgtttaatgtttttaaaaagatttacaccacgatgttctccagtctgcccggtacggcgatgattttcttggcaggcttgccttctatgaatttcaccgcgccttcagcggcgtattcggcagcttcttcagccggtttgtcgaaatcacgcataaattgccaataattctccaacttttttacggctgctgctgccttttgcggcaatattgcgctgaacttcaactgttttcaaaatggcagaagaataaatatcccttgtgaattcagtatcatgatttgaaatcaaaataccttgggagttgggcgcaatttattgattttttgtaaagtccgcgaccaatgaattcgatcgtattttggtcgcgcagaatttgcaactgttggcggattttgtctctgatatggttgttttggggaaattggatggatagtttgttttcaaattcatacatttgcgacaatgtgaattcttcggggagttggtcgatacatttcataacagccagaagccagcctttgcgctccgcattttggttgcgtaaaaacaaattggattgccattttttcagaacggtttcgggttcgataatgcgggaattgtctattaagaatattttgccgctttcaggcaaaggggcgagattgatagaacacataatgtggttcggccggtttttaatgcctttatttctgggaataatcatatccggcgtgatgaaatgtttgggtacaagcaccaattgccgtatggagtaatccgcttttttatatgcaagaaagaaaaagttggggttggtatctgaccggatgcgctccaacatggtgtgatatgcaccgtcaggcacgctgttgcctatggttttttgatttttactctttaattcatattgctcgtggcaatttgggcaaaagaggtctgcaacaggtttgttattggcaaatctctgcatcggcttgcttccgcaacaggggcagtagccgtttttttccaaccaagcctcgctcattacacggattttatgggttgctttattttgttgctttcccaattcggtatcgaaaaataaattcatgttttggattttgagatttcagttattcggggttcgtcatgcagacaacacaatccaccttaaaaaggccgtctgaaaccctgtttccaagtttcagacggcctttatccgtgtggctaaaccttaaaagcggttagacgacgatgttcaccagtctgcccggtacgacgatgattttcttcgccggtttgccttccatgaatttcaccgcgccttcggtggcgagtgcggcggcttcgaggtcggctttggatgcgtcggcggcaacagtgattttgccgcgcagtttgccgttgacttgaaccatcacttcgatttcggatttgaccaaggcggcttcgtcgactgtcggccagcctgcttcccacagtttcgcgccgttcaattcgctccacagggtttcgcagatgtgcggcacgatgggccacaacaggcgtacggcggtttccaatacttcttgggcgacggcgcgtccttgttcgccgccggtgtcggttttgtcgtattggttgagcaattccatcacggcggcgatggcggtgttgaactgctggcggcggccgtagtcgtcgctgactttggcagtggtcgcgtgcagtttgtggcgcaggtctttgagttctttagacaaaccgtcttggctgcctgcgaacgctttgaccgcttcgccttgcttcaagtattcgtaaacggtacgccacaggcggcgcaggaagcggtgtgcgccttcgacgccgctgtcgctccattcgagggactgttcgggcggtgcggcgaacatcataaacaggcgggcggtgtccgcgccgtaggcgttaatcagttcttgcggatcgacgccgttgtttttggacttggacattttttccgtgccgctgatgacgacgggcagcccgtcggctttgaggacggcggaaatggggcggcctttgtcgtcgaacgtcagctcgacatcggcggggttgatccaatctttgccgcctttgtcgttttcgcggtagtaggtttcgcaaacgaccatgccttgcgtcagcaggcgttcaaacggttcgtcaacattgactagaccttcgtcgcgcatcagtttggtgaagaaacgcgcgtacaagaggtgcaaaatcgcgtgttcgatgccgccgatgtattggtcgaccgcgccccagtatttcgcggcggcaggatcgaccatgccgtctgaaaattttggcgacatgtagcggaagaaataccagctcgattccatgaaggtgtccatggtgtcggtttcgcgtttcgccgcgccgccgcagcatgggcaggcagtttcgtaaaactcgggcatttttgccagcggcgaacccatgccgtcgggtacgacgttttcaggcaaaacgaccggcaattggtcggcagggacgggtacgtcgccgcattgttcgcaatggacgatgggaatcgggcagccccagtagcgttggcgcgaaatgccccagtcgcgcaggcggtattgggttttcggttcgcccgcgccttggctttgcagcttggcggcgacggcgtcgaatgccgtctgaaaatccaagccgtccaagtcgccgctgttgaccaatacgccgttttctttgtcgccgtaccattcttgccattggttttcgtcaaatgcgttgtcgccgacggcaatgacttgttttttcggcagattgtatttggtggcgaactcaaaatcgcgttcgtcgtgcgccggaaccgccatcaccgcgccgtcgccgtagccccacaatacatagttggcaatccacacttccagcttgtcgccgttgagcgggttgacgacgtagcggccggtcggcacgccttttttctccatcgtcgccatatcggcttcggcaaccgaaccggctttgcattcggcaataaatgcctgcaattcgggtttgtcggcggctgcggcggctgccagcggatgctcggcggcaacggcaacataagtcgcacccatcagcgtgtcggggcgggtggtataaacttgcaggaatttcgcgtaatcgccttccaagccttgtttgctgtcgtctgaaacggcgaagcgcacggtcataccgcgcgatttgccgatccagttgcgctgcatggttttgacttgttccggccagtgttccagcttgtccaagtcgttgagcagctcttcggcgtaatccgtgattttgaagtaatacatcgggatttcgcgtttttcgatcaatgcgccggaacgccagccgcgtccgtcgatgacttgctcgttggcaaggacggtttggtcgacagggtcccagtttaccgtgccgtttttgcgataaacgatgcctttttcaaacagcttggtaaacagccattgttcccagcggtagtattcgggtttgcaggttgcggtttcgcgcgcccagtcaatcgcaaaacctaggcttttgagctgggttttcatgtattcgatgttatcgtacgtccaagcggcaggggcgacgttgtttttcatcgccgcgttttccgccggcatgccgaacgcgtcccaacccataggctgcatgacgttgaagccgtttaaaagtttgaagcggctcaatacatcgccgatggtgtagttgcgcacatgccccatgtgcagcttgccgctgggataggggaacatggagaggcaataatatttgggtttggaagcgtcttcggagacgttgaaaatacgggcgtcgtcccattttttctgcgccgcaggctcaatggcggcgggccggtattgttcttgcatagtcattctgttttcgcttaaaaacgttggaaaaataaagtcggcatcaattataacaggttgccggaagcggcgaatcggcagattgccggcaggatgcgtaaattcgcacgcgcattattccgtatgccgtacaaatacaccgcgtttattgatacgcacgttttttatgctaatattacaaaccaaaatcaaatgtttaaaactctcctgatgcggctcttccgaacaaaaggcagacgggcatcgggtaaaagaggattctgcatatgaaaatcaaacaaatcgtcaaaccgggcttggcagtattggcggcgggcgttctgtctgcctgcgcaaccaaaagcaacgtcaaagccgacggcacgaccgacaatccggttttcccgaaaccctattccgtaacgctcgacaacaagcgcggcacattcccgacttatgacgaactggatcagatgcgccccggcctgaccaaagacgacatctacaaaatcctgggccgcccgcattacgacgaaagtatgtacggcgtgcgcgaatgggattacctgttccacttccataccccgggcgtaggtatcgaccctgaaaacacttccggcgtagaagatgttactacctgccaatacaaagtgattttcgataaagacaaatttgcccgcagcttctactggaaccccgtcttcccgaaagatgccgcctgtccgccgcccgcacccaaagccgagccgcaagtcatcatccgcgaaatcgtgccggcaaaaccgaaacgtatccgccaataatccgacatgccgttccgcctgtttttagggatattatgcggcctgtcaatggttgcccccgtatatgcacaggggcagccggatacggtcggcgactttatccaaaagaaaaaagtcatcgtcgatacatccaaagcggaactctgtttcgctgacgaccgtcagtgccaccccgtcctcatcggtgttgccacgcccaaggggacgttcgggctgacgctgaacagtaccgacaagcccggatacggcggcgaagtcatcggtttcaagcaggagggtgattttcttttcgccctgcaccgcgtttggaatcagataccgtcggaaaggcggaacgaacgcatcgcctccccgtccgtgtccgacaggattatgaccaacggctgcatcaacgtcagcgatgcggtgtacgaaaaactgcgtcattattttgtgttggaagtgatttgaaacagacggataccgcacgcgccggtatctgttttcacattgccccgatgcctgaaacagactgtccgccacgtcatgccgtctgaaaccggcgcagatgccgccaagccttcagacggcattgcctgcccgctccgaccgaacaacaaccatctttgggagaaccttatgcccgaacaaaaccgcatcctctgccgcgaactgagcttgctggcattcaaccgccgcgtgttggcgcaggcggaagaccaaaacgtcccccttttggaacgcctgcgcttcctgtgcatcgtttcatccaacctcgacgagtttttcgaagtccgtatggcgtggctgaagcgcgaacacaaacgctgcccgcagcgcaggctggacaacggcaaaatgccgtctgaaaccatcgccgacgttaccgaagcggcgcgctccctgatacggcaccagtacgacctgttcaacaacgtccttcagcccgagctggcacaagaaggcatccatttttaccgccgccgaaattggacagacacacagaaaaaatggattgaagactatttcgaccgcgaattgctgccgatcctgacccccatcggactcgacccttcccaccccttcccgcgcccgctgaacaaatcgctcaacttcgccgtcgaactcgacggcacagacgcgttcggcaggccttcggggatggcgattgtgcaggcaccacgcatcctgccgcgcgttgttcccctgccgtccgaactgtgtggcggcggacacggcttcgtcttcctctcctccatcctgcacgcccacgtcggaaaactcttcccgggcatgaacgtcaaaggctgccaccagttccgcctgacgcgcgacagcgacttgaccgttgacgaagaagacctgcaaaacctccgcgccgccattcaaaacgagttgcacgaccgcgaatacggcgacggcgtgcggctcgaagtcgccgacacctgtcccgcctacatccgcgactttctgctcgcgcaattcaaactgaccgccgccgaactctatcaggtcaaaggcccggtcaacctcgtgcgcctcaacgccgtccccgacctagtcaaccgccccgatttgaaatttcccacacacacgccgggcagactgaaagccttgggcaaaaccgcgtccatattcgatttggtgcgccaatcgcccatcctgctgcaccacccctaccaatcgttcgaccccgttgtcgaaatgatgcgcgaagccgccgccgaccccgccgtgcttgccgtcaaaatgacgatttaccgcaccggcacgcgttccgaactcgtccgcgccctgatgaaggcggcactcgccggcaaacaagtaaccgtcgtcgtcgaactgatggcgcgttttgacgaagccaacaacgtcaactgggcgaagcagctcgaagaggcgggcgcgcacgtcgtgtacggcgtgttcggctacaaagtccacgccaaaatggcactggtcatccgccgcgaagacggcgtgctcaaacgttacgcccatctcggcacgggcaactaccaccaaggcacatcgcgcatctacaccgacttcggcctcattaccgccgacgaacaaatcaccgccgatgtgaacatattgtttatggaaatcacaggtttgggcaaacccgggcggctgaacaaactctaccaaagtccgtttaccctgcacaaaatggttatcgaccgcatcgcacgcgaaaccgaacacgcaaaagccggcaaaccggcgcggattaccgccaagatgaattcgctcatcgaaccgaccgtcatcgaagccctgtatcgggcaagcgcggcaggcgtacaaatcgatttgattgtgcgcggtatgtgcaccttgcgcccgggtgtaaaaggcttgtccgaaaacatccgcgtccgctccatcgtcggcaggcagctcgaacacgcgcgcgtgtattacttccataacaacggcacggacgatacctttatctccagcgcggattggatggggcgcaacttcttccgccgcatcgaaaccgccacgccgattaccgcgcccgaactcaaaaagcgcgttatacatgaaggactgaccatggcactggacgacaacacccacgcgtggctgatgcagcccgacggcggctatatccgcgccgcacctgccgagggcgaatccgaagccgacctgcaaaacgatttgtggacactgctcggaggctgacccgcaccgccccaatcaaaaaccatgccgtctgaaacctttccgtttcagacggcatggttttacagcaatctaaacagggcggaccggagtcaaaaacacaccttcgccattcctgcacaagcacttcccctatacgctcccaaccccaagccgccgcattccagacggcattatagtggattaaattttaggggctgtactagattagcagatatgttaccctcgaaatatgaagataacgcactgcaaattaaagaaaaaagtacagaaagaactgctccgttttttgtgctggaagttaccgcccgttctgccgccgatattttgggtatccatcccaattcggcagcactgttctaccgtaaaatccgcacggttatcaaccatcatttagccttggctgccgatgaggtttttgagggccctgtcgagccggacgaaagcgatttcggcggacggcgtaaaggcagacgtggtcgcggtgcggcaggaaaagtggttgtcttcggcattctgaaacgcaacggacggggctataccgttgtcgtagataatgccaagtctgaaacgttactccctgtcatcaagaagaaaatcatgccggacagcattgtttataccgatagtctgagcagctgcgacaagttggacgtgagcggttttatccattaccgcatcaaccattccaaggagtttgcagaccgtcagaaccacattaacggcattgagaatttttggaatcaggcaaaacgcgtcttgcgaaaattatagtggattaacaaaaatcaggacaaggcgacgaagccgcagacagtacaaatagtacgaaaccgattcacttggtgcttcagcaccttagagaatcgttctctttgagctaaggcgaggcaacgccgtactggtttttgttcatccactatacctttccgacagccgaacaaaaccccgaatccgtctgcacggttcggggtatatctccaatacgggcatcgtgttccggaaaaccgtcaaatccgcatcggcatcacaatatatttgaaattcggattgttcggcacggtaaacagcgtcgagcggttggcatcgccgaaggcaagctgcatatcgtcggaatggatgttgcgcaacacgtccatcagatagccgatattgaaaccgacttcgagttcgccgccctgataggcgatttcgatttcttcgcgcgcttcttcctgctcgttgttgctgcacacaacgctcaacaggccgggttgcaaaaacaatcgcgcaccgcggaatttttcattggcaagaatcgatgcacgttccaacgcgcccaacaattctgccctcgacaacacgaaaatcttgtcgttgtccaaaggaatcacgcggttgaaatcggggaatttgccgtcgatgaccttgctgacgatggtcgtgccgttgcattggaaacgcacctgtttgtccagcagctcgatttgaatcggatcgtcggggttgttcaacagtttgaacagttccagcaccgttttgcgcggcaaaatcacttcggcgcgcggcaaatccgcatcaatcgcgcaggctgcataggcaaggcggtgtccgtcggtcgccacaaggcgcaactggctgccctcaacctgcatcagcagaccgttgagataatagcggatgtcctgcaccgccatgctgtactgcacttgcgacagcatggttttgaaacgctcctgctccagcgagaaagtcgcgctgatgtcctcgccgacattcatcatcggaaaatcggcggcaggcagggtctgcagggcaaaacgcgatttgcccgccttcagcgtcagacggctgtcgtcccaatccagcgacaccagcgcaccggcaggcagcgcgcgcaaaatatcctgaaatttcttggcattggtggtgatgcggaagtcgcccgcgccgccctcgggacccgcagtgtcgatttggatttccaaatcggttgccaagagtttggtctgaccgccttttccctcaatcaggacgttggacaggatgggcagggtgtggcggcgttcgacgatgccggtaacggcttgcaacggcttgagcaggctgtcgcgctcggcttgtaaaatcaacatgttcgctcctttaaatcggtttgtatagtggattaaatttaaatcaggacaaggcgacgaagccgcagacggtacaaatagtacggaaccgattcacttggtgcttcagcaccttagagaatcgttctctttgagctaaggcgaggcaacgccgtactggtttaaagttaatccgctatatctttacccttcggacggcatgggcaatatcatgtcgtctgaaaacgttttccatcagttttgaatcagaatcagcagcttttcataatcctgagccaattccggatcttcttcgcgcagtttcgccactgccctgatgccgtgcataacggtcgtatggtcgcgcccaccaaacgaatcgccgatagacggcaggctcaaagtagtcagttctttggtcaggctcatcgccacctggcgcggacgggcaatgtttcgtgtccgtttcttaccgagcacatcgctgattttgatgcggtaatatttcgccaccgcatcgatgatgatgtcggcggtgatgactttgtgcttctcggcaataatgtcctgcaaagcggtacgcgccaaatcgatgtcgatgacgggacggttcataaagcggctgctcgctccgacacgattaaacgcgccttcaagctcgcgcacgttggaacggatcagattggcaatgaacagcgcggcttcgtcttcgatactgatgcccgccgcttccgcctttttctgcaaaatggcgatgcgcatttccaattcgggcggctcgagttccaaagtcagtccccatgaaaaacgggatttgaggcggtcgtccatgccttcgattttcgcaggcaacacatcgcaagtgaggatgagctgttttttctcgttgtggaaatggttgtacagatagaaaaactcttccatcgtacggtctttgcctttgatgaactggatgtcgtcgataatcagcaggtcgtattgcttgtattgctgcttgaacacgtcgtaagtgttgttgcgaaccgccttcataaagctgcggatatagtcatccgaatgcatatagcgcactttggcatcgggacggtttttcagcagctcgttgccgaccgcctgcacaaggtgggttttgcccaaacccgtgctgccatagaggaagaacgggttgtaactctgccccgggctttccgcaatcgcctgcgccgcagccgccgcaaggcggttgcccttaccttctaccaacgtatcaaacgtgtaatccggagacaggttggtctgctcgtaacgcgcctcttccgcatcgcgctgcacgtccgtccgtgctttggcaactgccaccgattccggccgggaagcagacccggcagcctgacgcggctcgtgcggcaggtttttcatacgttccgccaaaatatccgccgccgttttcgacgcagcgggtttgacaggctcttcagacggcagctcgtccaacagaacctcctgcacgggcattccctccgacaccgcatgcaaggacggctcggcaggttcgacagcaccttcaaccgccgccatctcataacgcacgccttctcccggtttgaatacgaaggcggaacggccggcagccaactcttccctcaccgcttctatttttccggcaaactggctcttgagcatattgcaggcaaactggttcttgccgtacaccacccatacgccaccctcctcaccaacggtaaggggcgcaatccattgcgcaaactgcccttgaggcaacatatcgtgaagacggcggaggcacagcggccaaaactctgctaatgtcatggataggctcgaatcggtaaaaatgaaatcgaaaacaaagaaaatataatattttcaaaaagaaaacaaatctgttgaacgcacatcggttcaaaacgcgactgcccgattataccgactcacgaatattttatccacaacccgtgcaaaaatttatccacagaaaggcggcggaaatccgcaggcaatcgggcaatcttcctgcaaagtttctatattgattgacaaaagcggcaaattggagtgtaattcacggtttaattatctacccattctattttaggaaacatcatgaaacgcacttatcaaccttccgttaccaaacgcaaacgcacccacggcttcctggtgcgctccaaaacgcgcggcggccgcgcagtattggccgcacgccgtgccaaaggccgcaaacgcctggcggtataattttggactaccgcttcggaaggcagtaccgcttgttgaaaacggatgatttttcatccgtttttgcattcagaaaccgccgcagccgcgacctgctgcaagtttcgcgctcaaacggcaacgggctgggccatccccgcatcggtctggtggtcggcaaaaaaaccgccaaacgcgccaacgaacgaaattatatgaagcgcgttatccgcgactggtttagattgaacaaaaaccggctgccgccgcaggatttcgtcgtgcgcgtccaccgtaaattcgacagggctaccgcaaaacaggcaagggcggaactggcacaactcatgttcggcaaccccgcaaccggatgcaggaaacaggcatgatcagaacggtactctgcaggcaaggttcagacggcaacgggtttcccatacaaggaacatcccgatgaacttcctattgtccaaactcctgctgggactgatacggttctaccaatattgcatcagcccgctgattccgccgcgctgccgttatacgccgacctgttcgcaatacgcggtcgaagcggtcaaaaaatacggcgcattcaaaggcggccggctcgccatcaagcgcattgcacgctgccaccctttcggcggacacggacacgaccccgttccctgacccgacgcaatattcaaattgcacgctttccttttatttcccatcggtttctatataatgccgtctgaagcttcgggcaggcggcacgaccgccgggtatgaagcccgcccttattccccgtctatcggaacacgcaacctgcggcatttccgaccattcaggaaactcttatggattttaaaagactcacggcgtttttcgccatcgcgctggtgattatgatcggctgggaaaagatgttccccactccgaagcccgtccccgcgccccaacaggcagcacaacaacaggccgtaaccgcttccgccgaagccgcgctcgcgcccgcaacgccgattaccgtaacgaccgacacggttcaagccgtcattgatgaaaaaagcggcgacctgcgccggctgaccctgctcaaatacaaagcaaccggcgacgaaaataaaccgttcatcctgtttggcgacggcaaagaatacacctacgtcgcccaatccgaacttttggacgcgcagggcaacaacattctaaaaggcatcggctttagcgcaccgaaaaaacagtacagcttggaaggcgacaaagttgaagtccgcctgagcgcgcctgaaacacgcggtctgaaaatcgacaaagtttatactttcaccaaaggcagctatctggtcaacgtccgcttcgacatcgccaacggcagcggtcaaaccgccaacctgagcgcggactaccgcatcgtccgcgaccacagcgaacccgagggtcaaggttactttacccactcttacgtcggccctgttgtttatacccctgaaggcaacttccaaaaagtcagcttttccgacttggacgacgatgccaaatccggcaaatccgaggccgaatacatccgcaaaaccccgaccggctggctcggcatgattgaacaccacttcatgtccacctggattctccaacctaaaggcagacaaagcgtttgcgccgcaggcgagtgcaacatcgacatcaaacgccgcaacgacaagctgtacagcaccagcgtcagcgtgcctttagccgccatccaaaacggcgcgaaagccgaagcctccatcaacctctacgccggcccgcagaccacatccgtcatcgcaaacatcgccgacaacctgcaactggccaaagactacggcaaagtacactggttcgcctccccgctcttctggctcctgaaccaactgcacaacatcatcggcaactggggctgggcgattatcgttttaaccatcatcgtcaaagccgtactgtatccattgaccaacgcctcttaccgctctatggcgaaaatgcgtgccgccgcacccaaactgcaagccatcaaagagaaatacggcgacgaccgtatggcgcaacaacaggcgatgatgcagctttacacagacgagaaaatcaacccgctgggcggctgcctgcctatgctgttgcaaatccccgtcttcatcggattgtattgggcattgttcgcctccgtagaattgcgccaggcaccttggctgggttggattaccgacctcagccgcgccgacccctactacatcctgcccatcattatggcggcaacgatgttcgcccaaacttatctgaacccgccgccgaccgacccgatgcaggcgaaaatgatgaaaatcatgccgttggttttctccgtcatgttcttcttcttccctgccggtctggtattgtactgggtagtcaacaacctcctgaccatcgcccagcaatggcacatcaaccgcagcatcgaaaaacaacgcgcccaaggcgaagtcgtttcctaaatgccgcagcatgaaaaatgccgtctgaaacctgttcagacggcatttttattgcccaccccctatcggggcggaaatcttcaacccgcatacatcacaaaaatcgtcgggcgttttttcagattgggcatttcttttctttttcgccactgcacgattgtttgactgatgatttcctgtgtcggcaaggtcaaatccgtagccgtgcataaacgcgtttcaggatgcaggttttccaccgcatcggcaagcagcgcatcattgcggtaaggcgtttcaataaaaatctgcgtctcgccgcactggcgcgaacgctgttccaaagcccgaaaagcctgaatccgctcgtttttttcagacggcagatagcctttaaacgcaaaactctgcccgttcgcacccgaagccatcaaagccagcagcaggctggaaggcccgaccagcggacgcacttcaaaaccgtgtttatgcgccaatgccaccaaattcgcacccggatcggccacagccgggcaacccgcctcactgacaatgcccatactgcgcccttcttgcaaaggtttcagcaattccggcaaagtcttcaaatccgtatgttcattcaacgtttgcagattcagctcgcggataggcgtagtcacgcccaaatgtttcaaatgcgcacgcgccgttttttccgcctccacgacaaaatccgtcagcccgacaatcgcctgttgttcatgcggcaacaggcacggcgtgtcaggcgtacccaaaggcgtaggaatcaaatacaaaacaggagacatcattccctcactcatcggttaaaaatgccgtctgagcctttcagacggcataaacgggcagttacagaacctccacgccctcatttttcaagaaatcgaccagacggaaaaccggcaaaccgattaaagcattcggatcggtactctcaatcctttcaatcagcaatgcacccaaatcctcactcttcagcgcacacgaacaataaaccgcatcaggctcgcgctccaaatagcggaggatatgcaactcgtccaactgcctcatcacgaccaccgtcttatcgatatgccgccgcatcctgcccgtaaccgtattcaacagcacgatcgcgctgtaaaactcaatctccctgccgctcaagtgcatcagcatcttttgcgcattggcaaggttcatcggcttgccccactgcctgccgtcgcaccacgccacctggtccgcaccgacaatcaacgcctctgggaaacgcccggtcaacgaccgcgccttaccctcggcaaggcgcaatgccgtctgaggggcggattcccccaacatcggcgtttcgtcaaaatcgggggacgccgcctgaaaggcaatgccgagcctttccatctgttcgcggcggaaaaccgaactcgtacccaaaatcaaaggcagttccaaacccatcccatcctccttaccgttgaaaacacgcccgaaggggcagtaaaatccagccatgcgccgaaacacggatacccgccttcggcgtaccgcaacatttttcttaaaaatattgacgttagaacatctaaattatatcatatcccgtttatgtcagaccctaatttgattgacttggaaatttttgccgccgaagggcagaacctgcaaggcagttttctgctggaagaattggatgaacgcgtcagttcgcacgattatcccgccgacaggcagaccaaaatatcgtttacactgaccggcggtcgcgaccggctgcaacgcctgttcctcgacctgaacgtcaaagccgatatgcccctgatttgccagagatgtatcaaacccatgccgttcatgcttgatgaaagcagccgtatcgtcctgttttccaacgaagagtccttggacgaatccatgcttgccgacgaagaactcgaaggcatactgattgaaaaagaactcgacgtgcgcacattggtagaagaccaaatcctgatgtccctgcccttttcgccgcgacacgaagactgcggcgacaatgggacactggaagaagtcaatcgggacaaacccaacccctttgctgttttggcaggtttgaaaagcaattgattaggacacagtttatttatctaggagcttgaaatggccgttcaacaaaacaaaaaatccccttccaaacgcggtatgcaccgttcgcacgacgcgctgaccgcgcctgcactgtctgtcgacagcacaaccggcgaagtacaccgcccgcaccacatctcccccaacggtatgtaccgcggccgcaaagtggtcaaagccaaaggcgaataatccctattcgactgactgaaaaagccagaacattgccatgcaattactggctttttttgcattggacgcaccatccgtccaaactttcgccatacgtcaacacacaggggcaaagcgttccgtataataccccgtgaaaatattccaaaagccccaaccaccaaggaaattccgatgaaacagaaaatctggtacacctacgatgacatccaccgcgtcatcaaagcattggcagaaaaaatccggaacgccgacatcaaatacgatgccatgattgccatcggcggcggcggctttattccggcacgtatgctgcgctgttttctggaaattccgatttatgccgtaaccaccgcctattacgacagcgacaacgaaggacaggttaccgaagaagtcaaaaaagtccaatggctcgaccccgttcccgaagccctgcggggcaaaaacgtactcgtcgtcgatgaagtggacgacagccgcgtaaccatggagttctgcctgaaagaactgctcaaggaagacttcggtacgatcggagtcgccgtactgcacgaaaaaatcaaagccaaagcaggcaaaatccccgaaggcattccctatttcagcggcatcaccgtagaagactggtggatcaactatccgtgggacgcactcgacatcgacgaacacaaccgccttgccgaggccggccgaggctgaccctttcagacggcatattttccgaaccgatgccgtctgaagcccgcacgacccctgccgcagaccgaaaacctaccggagaaaccctatgattacattggccgtagatgccatgggcggcgaccaaggacttgccgttaccgtacccggcgcaaccgcattcctccaagcacaccccgatgtccgcctgattatgaccggcgacgaaacgcaactgcgccaagccctgaccgcggcaggcgcaccgatggaacgcatcgacatctgccataccacccaagtcgtcggcatggacgaagccccgcaatccgccctgaaaaacaaaaaagactcctccatgcgcgtcgccatcaaccaggttaaagaaggcaaagcccaagccgccgtatccgcaggcaacacgggtgcgctcatggcaaccgcacgtttcgtcctcaaaaccattcccggcatcgaacgccccgccatcgccaaattccttccttccgacaccgaccacgttacccttgcactcgaccttggcgcgaacgtcgactgcacgtccgaacagctcgcccaatttgccgttatcggcagcgaactcgtccacgcactccatcctcaaaaaggacagccgcgcgtcgggctggtcaacgtcggcacggaagacatcaaaggtacggacaccgtcaaacaaacctacaaactgctgcaaaacagcaaactcaactttatcggcaacatcgaaagcaacggcatcctctacggcgaagcagatgtcgtcgtcgccgacggctttgtcggcaacgtcatgctcaaaaccatcgaaggcgcggtcaaattcatgagcggagccatccgccgcgaattccaaagcaacctgttcaacaaacttgccgccgttgccgccctacccgccctcaaagggctgaaaaacaaactcgacccgcgcaaattcaacggggccatcctgctcgggctgcgcggcatcgtgattaaaagccacggcggcacagacgaaaccggtttccgctatgccctcgaagaagcctaccacgaagccaagtccgccggcctttccaaaatcgaacagggcgtagccgaacaactcgccgcactcgaaactgccaaagccgtccaaaacgaaaatgtcggcggtctgtaacacacacgatgccgtctgaacgcccccgcccctttcagacggcatccgcccgcaccaaacctgcgggcgcggacggcgatgcgcctgtccggcacttcccaaatatcgccttgtaaaataaggagtatttgaaaaatgaagacattagaaaaacggatgaaagctctagacaaacggattatgaagttcggaaaatcccttgaaggcaggcttgatgcccgtctgattgaatccgcattggattatattcattattcggaacgttttttggcttttgaaatcctgtgtacttatatcgaagatttcgatgtccggctgacggaacaagaatcccgggaaatttcttttatcaacaaggaatttgagatagaaagcacgtccgattaaccaataaagccaatgggttgataaacatgaaaacatcgacggtcgtttttggcggattttttatggcagacaacggagagcgaatccaaatccccgttttggaaaatcctgacattagggaaatcaatcactttttttccgtatcaaattttgagaaaaaaaccggcgtccttgttttcagaatcatccccgagccggaatttggcaataccgaattaactgtctattttaaaaaaggatattatagtggattaacaaaaaccagtacggcgttgcctcgccttgccgtactggtttttgttaatccactatatcagacgaaaacaaacacccgcgccaatagcctgacggcaacccggcaatcaaaatgccgtctgaagcagcttgggctttcagacggcatttccttcgcttaaaacagcgtatcggcaaccccgccctgcctgtccacggcaatctgcatctgaaaaccatctgtatcccaaaccacacccccatccctgtttccatcatgtgcaccctgtccgtattgggcaatcatctgtttttcgcttacaatagccgaatctgaaccaactctctaaaaaggccgttcccatgcagtatgcaaaaatttccggcacaggcagctatcttcccgccaaccgcgtcagcaatgacgaccttgcccaaaaggtagatacctctgacgagtggattaccgcgcgcacgggcatcaaattccgccatattgcagccgaaaacgaaaaaaccagcgatcttgccgccgaagcggcgcaccgcgcgctggatgcagccggattagacagcggcgaaatcgatttgattatcgtggcaacggcaacgccggatatgcagtttccgtctactgcgaccatcgtgcaacaaaaattgggcatcaccaacggctgccccgcgtttgacgtacaggcggtgtgcgccggctttatgtacgcgctgaccacggcaaacgcctacattaaaagcggtatggcgaaaaacgcgctggtcatcggcgcggaaaccttcagccgcattgtagactggaacgaccgcacaacctgcgtattgttcggcgacggcgcgggcgcggtggttttaagcgcgtcggacacgccgggcatcatccacagcaaactcaaggccgacggcaattatctgaaactcttaaacgtccccgggcaaatcgcctgcggcaaagtttccggttcgccgtacatttcgatggacggtcccggcgtgttcaagtttgccgtcaaaatgctgtccaaaatcgccgatgacgttatcgaagaagcaggttacaccgccgctcaaatcgactggattgttccccatcaggcaaaccgccgcattatcgaatcgaccgcgaaacatttaggtttgagtatggacaaagtcgtcctgaccgtccaagaccacggcaacacatccgccgcatcgattccgctggctttggatacgggcatccgcagcggacaaatcaaacgcggtcaaaacctgctgctcgaaggcatcggcggcggtttcgcgtggggcgcggtgctgttgcaatattgaacccgatgccgtctgaaacaggctttcagacggcatttcccatatcatgaagcggcaggctttcttcaaactgatggcgtgtgcggcatttctgtctgccgtttcgctgcgcctccccgtattgggcgcgtgttacgcaatattgtccctctatgcgtttgcactttacggcatcgacaaacggtgcgccatacgggggcaacgccgcattcccgaacaccgcctgctgctgcctgcattgctcggcggctgggtgggcgcgtatttcggcagcatgacattcaaacataagacagcgaaaaagcgttttgttgtgctgttccgtctgactgtttcaggtaatgtcttggcgaccctcatcctgatttatagtggattaaatttaaaccagtacggcgttgcctcgccttgccgtactatttgtactgtctgcggcttcgtcgccttgtcctgatttttgttaatccactatattattttgtcccgcctgaatttttcgtaaaactcgggcagaatacctgattatccaaccaaacaaaggaatactatgtcttttgccttcttttttcccggacaaggttcccaaagcctcggtatgatgaacggctttgccgaacacgccatcgtcaaaaacacctttgccgaagcctccgccatattggggcaggacttgtgggcgatgataaacggcagcgatgccgaaatcatcggtcaaaccgtcaacacccagcccattatgctcgccgccggcgttgccgtttaccgcgcctatttagaagcgggcggcaaaacgcctgccgccgttgccggacacagcctcggcgaatacaccgcactcgttgccgccggcgcattgaattttgccgacgcggtcaaactcgtgcgcctgcgcgccgaactgatgcagtccgccgtaccgcaaggcgtgggcgcaatggcggcgattctcggcttggaagatgagcaggttaaagccatttgtgccgaagccgcccaaagcgaagtggtcgaagccgtcaacttcaactcacccggacaaatcgtgattgcaggcaacgccgccgccgtcggacgcgccatggctgccgccaaagaagccggtgccaaacgcgccctgccgctgcccgtgtccgtaccttcccattgcagcctgatgaaacccgccgccgacaaacttgccgaagccctgaaaaccgttgaaatcaagcagccgcaaatccgcgttatccacaacgccgacgttgccgcctacgatgatgccgacaaaatcaaagacgcgctcgtccgccagctttacagccccgtacgctggacggaaaccgtcaacgccctcgtttcagacggcattgccgaatccgccgaatgcggcccgggcaaagtgttggcgggcttggcaaaacgcatcaacaaagccgccgcgtgcagcgcactgaccgatgccggacaggttgccgcctttatcgaagcgcactgacttcgttctgcaaaaagcagcctgccctcttcaggctgcttttcatgtccgaacgacggcagccccatatttacgctataatccatcccgaccaaaccaccgacagcggctgccgttgcagttcccgccctaccgatatgatagaaaaactgactttcggactgtttaaaaaagaagacgcgcgcagctttatgcgcctgatggcgtacgtccgcccctacaaaatccgcatcgttgccgccctgattgccattttcggcgttgccgccaccgaaagctaccttgccgccttcatcgcccccctgattaaccacggcttttccgcacctgccgcgccgcccgagctgtctgccgccgccggcatcatttccaccctgcaaaactggcgcgaacagtttacctatatggtttgggggacggaaaacaaaatctggaccgtcccgctcttcctcatcatcctcgtcgtcatccgtggcatctgccgctttaccagcacctatctgatgacttgggtctccgtgatgaccatcagcaaaatccgcaaagatatgtttgccaaaatgctgaccctttcctcccgctaccatcaggaaacgccgtccggcaccgtactgatgaatatgctcaacctgaccgaacagtcggtcagcaacgccagcgacatcttcaccgtcctcacgcgcgacacgatgatcgttaccggcctgaccatcgtcctgctttacctcaactggcagctcagcctcatcgtcgtcctgatgttccccctgctctccctgctctcgcgctactaccgcgaccgtctgaaacacgtcatttccgactcgcaaaaaagcataggcacgatgaacaacgtgattgccgaaacccatcagggacaccgcgtcgtcaagctgttcaacgggcaggcgcaggcggcaaaccggttcgacgcggtcaaccgcaccatcgtccgcctcagcaaaaaaatcacgcaggcaacggcggcacattccccgttcagcgaactgatcgcctcgatcgccctcgccgtcgtcatcttcatcgccctgtggcaaagccaaaacggctacaccaccatcggcgaatttatggcattcatcgtcgcgatgctgcaaatgtacgcccccatcaaaagccttgccaacatcagcatccctatgcagacgatgttcctcgccgccgacggtgtatgtgcatttctcgacaccccgcccgaacaggacaagggcacgctcgcaccgcagcgtgtcgaagggcgcatcagcttccgcaacgtcgatgtcgaataccgttcagacggcatcaaagccctcgacaacttcaacctcgacatcagacaaggcgaacgcgtcgccctggtcggacgttccggcagcggcaaatccaccgtcgtcaacctgctgccccgctttgtcgaaccgtctgccggcaacatctgcatagacggtatcgacatcgccgacatcaaactcgactgcctgcgcgcccaattcgccctcgtctcccaagacgtattcctgtttgacgacaccctgtttgaaaacgtccgatacagccgtcccgacgcgggcgaagccgaagtcctgttcgccctccaaaccgccaacctgcaaagcctgattgacagctccccgctcggactgcaccagcccatcggatcgaacggcagcaacttatccggcggacagcggcaacgcgtcgccattgcccgcgccattttgaaagacgcgccgatattattattggacgaagccaccagcgcattagacaacgaatccgaacgcctcgtccaacaggcgctcgaacgcctgatggaaaaccgcaccggcatcatcgtcgcccaccgcctgaccaccatcgaaggggccgaccgcatcatcgtgatggacgacggcaaaatcatcgaacaaggcacacacgaacaactgatgtcccaaaacggttactacacgatgttacgcaatatctcaaacaaagatgccgccgtccggacggcataaacaaaatgccgtccgaaatggtacaatcgccccgaccctttcagacggcatcatatccgccgacccatccgattatcttcaatcactgtaaaacccattatgacccaagacaaaatcctcatccttgacttcggttcgcaagttacccagctcatcgcccgccgcgtgcgcgaagcccacgtttactgcgagctgcattctttcgatatgcctttggacgaaatcaaagccttcaaccccaaaggcatcatcctctccggcggccccaattccgtttacgaatccgactatcaagccgataccggtatttttgatttgggcattccggttttgggcatctgttacggcatgcagtttatggcgcaccacttgggcggcgaagtgcagcccggcaaccagcgcgaattcggttatgcgcaagttaaaaccatagacagcgagctgacacgcggcattcaagatggtgagccaaacacactcgacgtatggatgagccacggcgacaaagtgtccaaactgcccgacggtttcgccgtcatcggcaacaccccgtcctgcccgattgccatgatggaaaacgccgaaaaacaattctacggcatccagttccaccccgaagttacccacaccaaacaaggccgcgccctgttgaaccgctttgtcttggatatttgcggcgcacaaccgggctggacgatgccgaactacatcgaagaagccgttgccaaaatccgcgaacaggtcggcagcgacgaagtgattttaggtctgtccggcggcgtggactcttccgtagccgccgcgctgattcaccgcgccatcggcgaccaactgacctgcgtgttcgtcgatcacggtttgttgcgcctgaacgaaagcaaaatggtgatggatatgttcgcccgcaacttgggtgtgaaagtgatacacgtcgatgccgaagggcagtttatggcgaaactcgccggcgtaaccgaccccgagaaaaaacgcaaaatcatcggtgcggaatttatcgaagtatttgatgccgaagaaaaaaaacttaccaacgccaaatggttggcacaaggcacgatttaccctgacgtaatcgaatccgcaggtgcaaaaaccaaaaaagcccacgccatcaaatcgcaccacaacgtcggcggcctgcctgaaaacatgaagctcaaattgcttgagcctttgcgcgatttgttcaaagacgaagtacgcgaattgggtgtggctttgggcctgccgcgcgaaatggtgtaccgtcatccgttcccgggtccgggtttgggcgtgcgtattttgggcgaagtgaaaaaagaatatgccgacctgcttcgtcaggcagacgatattttcattcaagaattgcgcaatactaccgatgaaaacggtacatcttggtacgacctgaccagccaggcattcgccgtgttcctgcccgtcaaatctgtcggcgtaatgggcgacggccgcacatacgattacgtcattgccttgcgtgccgtgattaccagcgactttatgaccgcgcattgggcggaactgccgtattccttgttgggcaaagtgtccaaccgcatcatcaacgaagtcaaaggcatcaaccgcgtggtttatgatgtgagcggcaaaccgcctgccaccatcgagtgggaataaacagcaaacatggctgccccgtccggcgcagtccttcgattatcggaaaaaaggaaaaaatatgagcacacaagatttaaacggcaaaatcgctttggtaacaggcgcatcgcgcggtatcggtgcagcaattgccgacacgctggcggcagccggtgccaaagtcatcggtacggcgaccagtgagagcggtgcggcggcgattagcgagcggttggcgcaatggggcggcgaaggccgcgtattaaattccgccgaacctgaaaccatcgaaagcctgattgccgacatcgaaaaagcgttcggcaaactcgatattctggtcaacaacgccggcatcacccgcgacaacctcctgatgcgcatgaaagaagaagagtgggacgacatcatgcaggtcaacctcaaatccgtgttccgcgcttctaaagccgttttgcgcggtatgatgaaacaacgttccggccgcatcatcaacatcacatccgtcgtcggcgtgatgggcaatgccggtcaaaccaactatgccgcggcaaaagcaggcttaatcggtttctccaaatccatggcgcgcgaagtcggcagccggggcattaccgtcaactgcgtcgcccctggctttatcgataccgacatgacacgcgccctgccggaagaaacccgccaaacctttaccgcccaaaccgccttgggcagattcggcgacgcgcaagacatcgccgatgcggttctgttcctcgcttccgaccaagcaaaatacatcaccggccaaacgctgcacgtcaacggcggtatgctgatgccttaacagacaactttttcaaccatgccgtctgaagccctttcagacggcatttgcattctcaggcaaaatgaacacacaccacaccccgccctgcccatgcggctcaggcacaagctgagacctttgcaaaattcctttccctcccgacagccgaaaccccaacacaggttttcagctgttttcagctgttttcgccccaaataccgcctaattctacccaaatacccccttaatcctccccggacacctgataatcaggcatccgggtcaccttttaggcggcagcgggcgcacttagcctgttggcggctttcaaaaggttcaaacacatcgccttcagatggctttgcgcactcactttaatcagtccgaaataggctgcccgggcgtagcggaatttatggtgcagcgtaccgaagctctgttcgaccacatatagtggattaacaaaaaccagtacggcgttgcctcgccttagctcaaagagaacgattctctaaggtgctgaagcaccgagtgaatcggttccgtactatttgtactgtcttcggcttcgtcgccttgtcctgatttttgttaatccactatacatcatcgctactaccgttccggcgcaacaggcattcctcgatgccgccgaactgatgcaatggagtatagaaaccgaagggctgggcttgaacgtcatctcgcacaagatactcggcaaagaccacgcccaagtcgaatttgaagcctacttccgagacggacaacaccgatccgcgcatcacgaactgtccggcttcgtcaacatcggcggacaatggtattttatcgatcccaccgttccgcatcctgcgatgaaacaaccctgcatttgcggatcaggcaaaaaattcaaagcctgctgcggcaaatatctgaaacctgtcgcataaaaatgccgtctgaacgttcagacggcattttcaacgtgcaaaaaaaaccattcataccaagggtaagtatgaatggtcaatacattgcgggaaaacgtcttacttgctgcactgccgaaaagggagaaacggcagcggtaatcagcggaaaggattgtacccgaattaatattaagaaacgttaatcgcgaaaatatattaacaaacctgttgaaacctattggttttcccgtatccacccgacccagcgttcaaacagcttcggttcgagcgcggcaacgaccgagcgtttgaacacgtgttcaccactccaaaacccgtcgccttccaaagtcgtcagcctgccgcccgcctcctcgaaaatcaacgcgccggcggcataatcccacagcttctgcccgccgtgaacataaacatcataacgcccgcacgccagataacaccaatccaacgtactgctgcccatactccgtatcgttccaaaaggcgcgagcgtactcatacggctggaaagtttgcccgaacgcagatatttgatttccacgcccgcaatcgcctcattgagttttttatccacgaggcgcaggggcagacgcgtcccgtttaaaaacgccccctgcccgcgttcggcataaaaacattcgccgctgactgggttgtagattacgcccaactcggcgcgcccgttgcggacaaacgccaccgataccgcaaaatgcggcagcccgttgacaaaattgttcgtcccgtctatcggatcgacaatccacagccccttttcccccgaatattgttcccacaaagccgactgttcctgccgcgacatttcctcacccaacatcggactgtcgattaaaagcggcaacgcggcggcaaaagccgtctgcgcggcaatgtccgcctcgctcaacatcgaaccgtcttccttgcggtgagacggcgtattcaaaaaacgcggcataatttcggtttgcgcgatatggcgcacgactttctgcaaacggtgtaacacttcctactgtcctcatattttgaacttgcggcgcgcgaacgtataatgtccgcttccatcacgccgctgcgacggattataaccgtccgaaccgccaaaaactatgccccgattccacctgcccgaaaacctttccgtcggacaaaccgtcgccctgcccgacaacatcgtccgccacctcaacgtcctgcgcgtccgccccaacgaaaacatcaccctcttcgacggcaaaggcaaggcacacgccgcacggctgaccgttttggaaaaacgccgcgccgaagccgaaatcctgcacgaagacacaaccgacaacgagtccccgctcaacatcacactgatacaatccatctcctccggcgatcgcatggatttcaccctgcaaaaaagcgtcgaactcggcgtaaccgccatacagcccgtcatcagcgaacgctgcatcgtccgcctcgatggggaacgcgccgccaaacgcctcgcacgctggcaggaaatcgtcatctccgcgtgcgaacaaagcggcaggaacaccgttccccccgtactgcccatcatcggctaccgtgaagcactcgacaaaatgccgtctgaaagcaccaagctgattatgagcatcaaccgcgcccgcaaactcggcgacatacgccaaccgtccggcgcaatcgtctttatggtcgggcccgaaggcggctggacagaacaggaagaacaacaggcatttgaagctggctttcaggcggttacactcggcaaacggattttacgcacagaaaccgccccactcgccgccctcgccgccatgcagacgctttggggcgatttcgcataaacagaaatgccgtctgaaacccgttcagacggcattttgcagccgattaagatagtaggttcaaataagatttcccgtgtcgtcattcccgcgaaagcgggaatctagaaacgaaaaactacagagatttatccgaaacaacaaccctctccgccgtcattcccgcaaaagcgggaatctagaaacgaaaaactacagggatttatccgaaacaacaaaccctctccgccgtcattcccgcgcaggcgggaatctagaaacgaaaaactacagggatttatccgaaacaacaaaccctctccgccgtcattcccgcgcaggcgggaatctagaaatttaacgttgcggtgatttatcggaaatgactgaaactcaacggactggattcccgcctgcgcgggaatgacgagattttaggtttctgtttttggttttctgttctcgcgggaataacggaattttaagttttaggaatttgtcggaaaaacagaaatccccccgccgtcattcccgcaaaagcgggaatctagaaacgaaaaactacagggatttatccgaaacaacaaaccctctccgccgtcattcccgcgaaagcgggaatctagaaatttaacgttgcggtgatttatcggaaatgactgaaactcaacggactggattcccgcctgcgcgggaatgacgaattttaggtttctgtttttggttttctgttctcgcgggaataacggaattttaagttttaggaatttatcggaaaaacagaaatccccccgccgtcattcccgcgaaagcgggaatctagaaatttaacgttgcggtgatttatcggaaatgactgaaactcaacggactggattcccgcctgcgcgggaatgacgaattttaggttgctgttttttggttttctgtttttgcgggaatgacgaattttaggtttctgtttttggttttctgttctcgcgggaataacggaattttaagttttaggaatttgtcggaaaaacagaaatccccccaccgtcattcccgcaaaagcgggaatctagaaatttaacgttgcggtgatttatcggaaatgactgaaactcaacggactggattcccgcctgcgcgggaatgacgaagtggaagttacccgaaacttaaaacaagcgaaaccgaacggactagattcccgcctgcgcgggaatgacagtgtatccatttctaattttaatccgctatattttacacaaactatttgaacgatatgacccgcctgccgtaagctttctcaagctccgcctgcctttgacgctccattcttttcttcttttccctaccgaatttacccaaagcacgcttcaagtcaaacatcaccttcaacgaacggcggtgtcttctttcttgttccctatctttttccaaatcgctacccaacatactgtttttactgaggaacttggcataatgcaattcttgggtacataaggcgggattaacctgataaacaggcatcccctccttatcaaagaaataagtaaacatcatccaatctaccgctttaatccactctgccggcaaaacggcaaacctttccaagaaaaaccgcatcgcctcacgcgaaatgatatagccagccgtcccccaatgttcgctctccagcaaaggaaatgaccgattctcataattcaggactttatccggtctgacaataactttcgcaaacatcgtttccaaacgaacgataaaggcagaatccttatcaaaacgctcttccaaccaagtatcttcggcaaggaacttttctgcgtctttgccaagcaggacatcatcctcaaatacggcaacatagggcagaccttcatccaatgcctgtttccacaatacggcgtggctcataaagcaggctttttccacttcgctcaacaggtgctgttttgccaatcccggcaccaattccgccatcatccgattcagttcttcagacggcatcagtgcgtcgaaaaactgaaacgggatgccgcgcacgccgaaggttgcggcaatgtgcgccctgcgttctgcggcggaagctaagctgataacatggttttgcataatttatcctgttttttgtctgttggataaagcggcgtttttcaacggtttttcagcaatcggcgcaaaatgccgaagtattgcctcaaggtaaacagccgccgcatcctgccgtctgctgcaaatacgatgtccatctctcctccttttattggaaaggcacaatgaactgttcgcgcctttgccggcgtttttccctttccctgctgattttggtcaaggcgcggatcaggcggtgtttgaatgtgttggcgggggaatcgcgcctttgctgtttgcggttcaggaggcggtcgtgttcgatcaggctgcccaatgcgctgttttggtcgtgaaacttggcataatgcagctcttgggcgcacaaggcgggattgagctggcaaaccggcattccttccctgtcgaaaaaatcgctgaacatcatcagatcgacggggtgcagcccttcgggcggcagggcggcaaacctgtccaggaaaaaccgcatcgcttttcgggaaatgatatagcccgccgtcccccagtgttcgctttccaacagcggaaaggcgcgcccgcagtaatccgccacgccggagggcgaggtcaggacgtgcataaacatcgtttccaagcggacgataaaggcggtatccgggtcaaagcgttcttgcagccaagcgtcttcggcaaggaatttttccgcaccttcgccgagtaaaacgtcgtcctcaaatacggtgatatacggcagaccttcgtccaatgcctgcttccacaatacggcgtggctcataaagcaggctttttccactccgctcaaataggggtgcgccgacaagccggggacgagttccgccattgcctgttccagcctttcagacggcatcagtgcgtcgaaaaactgaaacgggatgccgtgcctgccgaaggtatcggcaatgtgcgccctgcgttctgcggcggaagctaagctgataacgtggttttgcataatttatcctgttttttgtctgttggataaagcggcgtttttcaacggtttttcagcaatcggtgcaaaatgccgaagtattgcctcaaggtaaacagccgccgcatcctgccgtctgccgcaaaatccagccacgcgccggcgggcagcgtgtccgtccgtttgaagcattggtacaaaaaccggcgggcgcgttcaaaatcttcttccggcaaatgtttctccagcaattcatacgctactgcttttatttggcggtattcaaggctgtcgaaccgggttttaaaacccatagactgcaaaaaatcgtttctggcggttttttggatgccttgcgcgatttcgtgttggcggatgctgtatttggatgaaacctgattggcgtgaaggcggtatttgaccaaggcttcgggataataagccagcctgcccaatttgctgacatcgtaccaaaattggtaatcttccgcccaatcccgctcggtgttgtaacgcaaaccgccgtcaatgacgctgcgcctcataatcatcgtgttgttgtgtatggggttgccgaaagggaaaaagtcggcaatgtcttcgtgtcgggtcggttttttccaaattttgccgtgttcgtggtgccgcgccagccggttgccgtccttttcttccgacaaaacttccagccacgcacccatcgcgatgatgctgcggtctttttccatctcacccacgattttctcaatccagtcgggggcggcaatatcgtctgcatcggtgcgcgcaatatattccccccccccccccgactttgccaattcatccagcccgatgtttaaagagggaatcagaccggaattgcgcggctgcgcgaggatgcggatgcggccgtcctgttcttggaaacgctgggcaatggcaagcgtaccgtccgtcgagccgtcatcgacaatcaaaatatccaagttgcgccaagtttgattcacgacggcggctaatgattgggcgaaatatttttctacgttgtaggcgcaaatcaatacgctgactaaaggctgcaatttattctcccgataggcacgatgccgtctgaaggcttcagacggcatttggactgtacaacggttactcgcccaaaagcgcgatatccgctaccgcgttcatttgttctgccaagcggttcagcaggttcaggcggttttgtttcacggcggcatcttccgccatcaccatcacgccgtcgaagaaggcatcgacttgcggtttgacggaagccagttcggacaaggcggtctggaaattgccttcggcaacggcggcggcaattttcggctgcaagccttgtgcggcggcaaagagggctttttcttcgtcctgttgcagcaagctttcgttaaccgcgcccaactcggcatcggcttttttcagcaggttttgcacgcgtttgttggcagcggcgagcgcggcggcttcgggcagttgtttgaacgcggcgacagcctgcagtttggcggtcaaatcgtccaaacggcgcggctgcttggcaagtacggcggcaacgatgtcttgcggataatcgttttgcagcaatacggcaaggcgcgcctgcatgaagtcggcggtttcagacggcgttttttcgttgagcaaaccttgcgggaagctgttgaaggccgtctgaatcagttcgtttacgtccaaaccgtactgcatcagcatacgcaaaatacccaatgcggcgcggcgcagggcgtatgggtctttgtcgccggtcggaatcaggccgataccccaaatgccgaccaaggtttccagtttgtcggcaagcgcaacggcggcggcaattttgccctcaggcaggttgtcgccggcaaaacgcggttggtagtgttgctcgacggcttcggtaatttcttcggtttcgccgtccaagcgggcgtagtatttgcccatcgtgccttgcagttcggggaactcgccgaccatttcggttactaagtcggcttttgccaaacgcgcggcgcgttcggctgcggcggcatccgcgcccaaagccttggcgatatgggcggcgatgctttgcaggcgttcgatgcgttcggcttgcgaaccgattttgttgtgataaaccacgttcgtcagtttgggcaggcggctttccaaagtcgctttttggtcttgtttgtagaagaactcggcatcagacaggcgcgcgcgcaagacacgttcattgccttggatgatgtgtgacggatcttcggtttgcagattggacaccagcaggaagcggttcatcagcttgccgttttggtcgagcagcgggaagtatttttggttttgctgcatcgtcagaatcaggcattcttgcggtacggcgaggaagtgttcttcaaaaccggcttccaataccacaggccattcgaccagcgcggttacttcgtccaacaaggcttcatcggcggcggcggtcgcgttcagacggcgtgcctgcccttccaataccgtctgaatcgcggctttgcgctcggcaaacgaagcgacgactttgccttgctcgcgcatttgtgcggcgtagctgtcggcgttttcaatggtaatttcgccgtcggagaggaagcggtgtcccaaggttttgttgccgctttgcagacccaaaacgctgacgttcacaatgtcgccgccgtgcagtacaactagcccgtgaacggggcgcacaaaggtaaacgtgctgctgccccaacgcattactttgggaatcggcagcttcttaaccgcttgattgataatgtcttccaaaagtccgcccaacggtttgccgatttggacgtattcgtaggcgtacacgtcctgcttgccgtcgtggacgatggtcaagtcttcgattttcgcgcccgcaccgcgtgcgaaaccttccaaagccttggttggcgcaccgtctttcatggcattcgctacggcagggccttttttcacaattttttgatcagcctgaacggctttgacgtttttgacttgaaccgccaaacggcgcggcgaggcataagccgtaaattcggctgcgccgtcaaccagttgcgctttttccaagccttcggcaacggaagcggcgaaatggttgcccagattattcagggctttgggcgggagttcttcggtaaggagttcgattaaaagggtttgggtcatcattcggctttctttgaatttggttaatctgcctgtttataggtttcgctgtaattttcccagccgtcatccccataaaaaccgtcaaccagcggggtggcgtacaaagtggcaacatcttcgcggtctgccagccaagagataatggcttttttctcggtttctcccaagcttcgggcaccggatttttgaaacaggcacgaaaaatcgccgcaatcgcccccccgccatttcaaagccgtttgccgcaagatacgcaatcagctcgtccataaagcggtcgaacgcttcggcatcgtcctcagcttggtgcaaactgccttgaacgccgaaaatcaatgtttgaaactcgcccaaatgcagctttttatgctggcggcggttcattttgtgcaggcgtttcctgcttggggtgcggaaatagacaggcatgattttcctaaaaaatataatggcttccggacggctgccttatcgtgccgcccgaacgtaaaaaatcgtcgcccccttaggcggcgtttgccttcattaaagggaagcccagtttttcgcggctttcaacatatttttgcgccacggcgcggctcaatgcacgaatacgtccaatataagttgcccgctcagttacggaaatcgcgccgcgtgcgtctaaaaggttgaacgtatgccccgctttgaggacaagctcgtaggcaggcagggcgagggcggcgttttcttcggcaagcaggcgtttggcttgcgcttcgtagtcgttgaactggcgcagcagccagtcggcatcgctgtattcgaagttgtaggtggattgctcgacttcgttttggtggtacacgtcgccgtaggtgacggtgttgccgtcgagcgtttttgcccaaacgaggtcgtagacgttttctacaccttgcaagtacatcgccaagcgttcgatgccgtaggtgatttcgccgagtacgggcgtgcagtcgatgccgccgacttgttggaaataggtaaactgggttacttccatgccgttgagccagacttcccagcccaaaccccacgcgccgagggtggggttttcccagtcgtcttcgacaaagcggatgtcgtggactttgggatcgatgcccaattcgcgcagagagtcgagatagaggtcttggatattggcgggagcgggcttgagggcgacttggaattggtaatagtgttgcaggcggttggggttgtcgccgtagcggccgtctttggggcggcggctgggttggacgtaggcggcaaaccaaggctcggggccgagtgcgcgcaggcaggtggcgggatgggatgtgccggcaccgacttccatgtcgaagggttggatgacggtgcagcctttgtctgcccagaatgtttgcagtttgaagatgatttgttggaaggtaagcatggcttatgattcgataaaataaagggtttattttactgtttccattgctgtttggataggtttatctcaaagacagactgatttgaaaacacggcatacatgatatagtggattaaatttaaaccagtacagcgttgcctcgccttagctcaaagagaacgattctctaaggtgctcaagcaccaagtgaatcggttccgtactatttgtactgtctgcggcttcgtcgccttgtcctgatttttgttaatccgctatatgtttcggttaggcggcaggctgccctattgaataccttaaagcaggctatgcctgccaacgccatatccaaacacagtctttaatttaaatccggaaaataaaaagcacgaccaaacggtcgtgcttttccaaaccaaacaagtttatttcttgtgcgaacggatatagtccaaagttttgagctgtgcaatcgcagcagccaatactttatgcgcttccgccaaagccttatcgtctttagcttgggaaatgcccgcttctgcggcttttttcgcctcttccgcacgtgcccgatccatctccgcactgcggacggcaacatccgccaagacagttactttatcaggctgtacttccaaaacaccgccggaaacagcaaccaaaacctctttatcctcgcccggaacggtcaaacgcaaagcccccggccgcaccaaactcataatcggctcgtgtcgcggataaataccgagttcgccctgtacagtcggaacaacgataaatgttgcctcgcctgaatagattttctgctcgctacttaccacctcaacttgcatgatgctcatgccgacctccttagtttaaggttttcgctttctctactgcttcttcaatgctgccgaccatatagaatgcctgctcgggcagatgatcgtattcgccgttcaagatggctttgaagccggcaatggtatcgcgcagggcgacatatttacccggagaacctgtaaacacttcggcaacgtggaacggttgggacaggaagcgttggattttacgcgcacgcattacggtcagtttgtcttcatcagacaattcgtccatacccaagatggcgatgatgtcgcgcaattctttgtatttttgcagggtggactgcacaccgcgcgccacgtcgtagtgctcttgacccaataccatcggatccagttggcgcgaagtagaatcaagcggatcgactgccgggtaaatacccaaagaggcaatatcgcggctcaatacgacggttgcgtccaagtgggcgaacgttgttgccggagacgggtcggtcaagtcgtccgcaggtacatatacggcttggatggaagtaatagaaccggtttgggtagaggtaatacgctcctgcaaacgacccatttcttctgccaatgtcggttggtagcccactgcagacggcatacgacccaacaatgcggatacttcggtaccagccagggtgtaacggtagatgttgtccacgaagaacaatacgtcgcggcctttgccgttttcgtctttttcgtcacggaagtattccgccatggtcaaaccggtcaatgcgacgcgcaaacggttgcccggaggttcgttcatctgaccgtaaaccattgccactttatccaatacgttggaatctttcatctcgtggtagaagtcgttaccttcgcgggtacgctcacccacgcctgcgaacacggacaagccgctgtgcgctttggcgatgttgttgatcaattccatcatgttcacggttttacccacaccggcaccgccgaacagacctactttaccgcctttggcaaacggacacagcaagtcaatcactttaatgcccgtttcgagcaattcggttgtggaagacagttcgtcaaacttaggggcagcttggtggatggcacggctcttgtcggtatcgatcggacctgcttcgtcaacaggcgttcccaatacatcgacaatgcgtcccaacgtacctttacctaccggcacagtaatgggcgcaccggtattgctcacagtcatgccgcgtttcaaaccgtccgagctgcccatcgcaatggcacggactacgccgtcgcccaaaagctgttggacttccaaagtcagaccgttttcgtctaatttcaaagcgtcgtaaacgcgcggaatcatgtcgcgtggaaattccacgtcaacaaccgcaccgataatttgtacgattttgccttggctcattatcgtatcctaatttccgtacaggattcagacggcatcagacagccgccgcacctgctacaatttctgacaattccgtggtaatcgcagcttgacgcgatttgttatataccaaacgcaactctttgatggcattgcctgcattgtctgttgcagctttcatggcaaccatgcgggctgcctgttcggatgccatattgtcgctcaacgcctgataaaccacagactctaaatagcggcgaaccagatattccaacactgcaagtgcagtcggttcgtagcggtattcccagctgaacggtgatttgggagctgaatcgccaatcacgttctcaccgataggcagcaatacttccattctcggttcttgacgcatggtattgacaaaacccgaatacaccagatggattctgtcaatttcatgtttctcataccgttggaagagttctgtcaaaggtccgagcagcatttccatttttggggtatcgcccaaatttacggcactggcaaccacattcagaccaatgctctgacacgccatcagacctttactgccaaagcatacgatttcctcttcaataccttgattccgatactcttgaacttgtgccaaaaactttttcagcacgttggcgttcaaaccgccacacaaacccttatcagacgtaatcaaaataaaaccgacacgtctgatttcccgatgagattccagtaacggaataccatgatcggtattggtttgcgcaagatggctcatcaccatacgcactttttcggcatacggacgcgccaaacgcatccgttcctgagtcttccgcattttagaggttgacaccatctgcatcgctttagtgatcttttgggtattctgaacactgcggattttggtgagaatctcttttcctactgccatttcagactcctttcacttcaagccttatgcctgataggcgtaagaagatttgaaggatttcatggctgcttcaagcgttttctcgctctcgtcggacattgcacctgaagcattgacggcttccaaaacttccggatgttgggtacggacaaagctcaaaaattcagattcaaaagccagagctttggcaaccggaacatcagaatacgaaccgttgttgattgcccaaagggtcaaagccatttcagccgtattcaacgtactgaactgtttctgtttcatcagttcggttacgacttcgccatgctccaattgtttgcgcgtagcttcatccaaatcggatgcaaattgcgagaacgccgccaattcacgatattgtgccaacgccaaacggataccgccacccagctttttaatcactttggtttgtgcagcaccgcctacgcgggatacggaaataccggcattgattgcaggacggataccggcgttgaagaggtcggtttccaagaaaatctgaccgtcggtaatcgaaatgacgttagtcggaacgaaagcagatacgtcgcccgcttgggtttcgataatcggcaacgcggtcagagaaccggttttgccttttacttcgccgttggtcaatttctccacttcgtgttcattgacacgtgccgcacgttccaacagacgggagtgcaggtagaacacatcgccgggataggcttcgcggccgggcggacggcgcaaaagcagggaaatttgacggtaagccacagcctgtttggacaaatcgtcataaacaatcaaggcatcttcgccacgatcgcggaagaattcacccatcgtacaaccggagtaaggtgcgatatattgcaatgccgccgcttcagatgcagttgcagcaaccacgatggtatgctccatcgcgccatgctcttccaatttgcggaccacgttggcaatagaagatgctttttgaccgatagcgacatagatacagataacacccgtacctttttggttgacgatggcatccaatgctacggccgttttacctgtctgacggtcgccaataatcaactcacgctgaccgcgaccgacaggaaccatagagtcaatcgccttcagaccggtttgcatcggctggtcaaccgatttgcgcgcaatcacgcccggtgcgattttttcgataggggcggtcaaagttgtattaatcgggcctttgccgtcgataggccgacccaatgcatcaacgacgcgtccgaccagttcgcgtccgaccggcacttccaagatacgaccggtacaggtaaccgtgtcgccttctttaatgtgttcgtactcgcccaacactacggcgccgacggagtcgcgctccaggttcatcgccaagccgaaagtgttacccgggaattcgagcatctcaccttgcattgcatctgacaaaccatggatgcgaacgataccgtcagttaccgaaattaccgtaccacaggtacgcacttcggcatttacagacagattttcgatcttggctttaatcaaatcgctaatttcagcaggattaagctgcatgaaaactctcctaattcgtcatagtcgtgtacaaggcactcaatttgccttgtacagacaaatccaaaacctgatcacccacttcaacttttatgccgccaatcagctccggttcgatttcgacagagattttcagctcgctgtcgaaacgcttattcagcatttgcaccaactcgccgacctgtttgtcggtcaacggataggcactgtaaatgacggcagatttgatatggttgaatgataaggtcaagtcttgatattgagcatatacttccggcaatatcgacaaacgtttctgcccggccaagacgataacaaagtttttcaactccttgtctttcaaaccgaccaaatcgatgaggatatctgctttttctgaagcattcgtttcaggacggtcaatcaatgaagccaccttcccttcctgaacaaccgccgcaagtttttccagtccgcccaaccaagactcaatttggtttttttcctgagccagaccgaacaatgcctttgcataaggtctggcaatcgttgcgaactctgccataagattacagctcctgtttcagggtatcgagcagttttgcgtgtttggaagcatcgacttcgctgcgcaaaatagattcggcacctttgacagccaacacggcaacctgctcgcgcagggattcgcgtgcgcggaacaattcctgctccacatcggcctttgcctgagctgcaatgcgcgccgcctcggaagaagcctgttctttggcttcttcgacaattttggcggcacgtttttcggcgttggcaaccatttcggaaacctgattacgcccttctgccaagagttctgcaacctttttttcagcctgctcaaaatcgcttttaccacgctcggcggcagccaagccttcggcgacttttgcggcacgctcatccaaagcttttgcaatcggcggccacacgaatttcatggtaaaccataccaaaccgaaaaagacgatgatttgagcgaataatgttgcattgatattcacgttacttaaccttcgtactggggttaatcaaacaggctgcgcctgtacggaacggacgaatccgtcctgattatgcacctgcaaacgggttaacgaaggcgaacagcagtgcaatggcgacaccaatcaagaatgcggcatcaatcaaaccggcaatcaggaacagtttggtttgcagcggaccgatcagttcgggctgacgggcagaagactccaaatatttagaaccgaccattgcgataccgatagaggcacccaatgcacccaatgcaacgatcaaaccacatgcgatagcaatcaaacccattttaaactccttaaagaaacaaaggttaaactacaaaaacaaactacttaggaaaatcagtgcgcatcatgtgcctgtccgatatagacgaacgccaacgccatgaaaataaacgcctgcagggtaatcaccaaaatatggaaaatcgcccatgccaaaccggcaataatgtggaatacaaacagaatcggatccatgacttcgacgctgccggaagccgcccaagcaccgccaagcaaggctatcaacaagaataccaattcgcccgcatacatattgccgaacaaccgcataccgtgggatacggttttagaaagaaactcgaccaaattcaacagaaagttcgcaggtgcgagttttgcaccgaacggcgcgctgaacaactcgtgaaaccagccacccaatcctttgattttgatgttgtaatagatacaaatcagcaacacgccgacagcgagtgccaaagtggtgttcaaatcggcagtcggtacgacgcgcagcagggcgtgatggttgccggtaatgccctgccataccatcggcagcaaatcgaccggcagcatatccatcgcgttcatcagaaaaatccagacaaacagcgtcagacccaacggcgcgacggcttttctagacttttcgttgtgaatgatgctcttacacatatcgtccacaaactcaaacaagatttccactgcggcctggaaacgtccgggaacgcctgccgtcgctttttttgcaccgcgccacaacagaaagctgccgattacgcccaacaggacggcaaaaaagacggcatcaaggttaataaacgaaaaatcagcaatgtttttcagtccctgaccctgagtaacatccgacaaactggtcaagctctgcaagtggtgcttgatgtagtcggcagcggtaatggtttcacctgccataatctttcactctcaacaatactaaaaaaaccaaatggctgacaccgagcagccccatcagaaacggggcgaacaccagcgattgatgccatattgcaaatacggcaagcatggacaacagcgacagcactacttttaaaatctctccgaagacgaacatcctgctttgcaggaaggggtttcccctgaaaagttttaaaagtaaaactgcaacaaacgtgggaagcaggtaggacaaaccgccaccgaccgccgaaaggaatccggcaaaaccccatacagcaaaggcaactgcggcgcatatggacaatacggcggattgtaggatgataatctgcttcataaagggaatgtttccgcctcggatttggggcgcggctaatataatttagaagccttattacgtcaagcgacagttaatctttgtgaaacaacgtatcccaatccgccgcgctcgccgcctgaataacggcgacaggtgtcattctaacacacattacatataattacaggatattaaggagtttgtccgcaatttctttacatttttaatgttcttacgtgatttgtttgctttacgtggaaataataaaaaatcaacgcgaaattgtagcagtttatcggtcggattgtcggcagtttggggaatttgctcaataaataaaaggtcgtctgaaaatattttcagacgaccttttccgaataaaggattagcaactgcctgccgctttaagcaaagcattgcattgacttttgcctttgtgcgttccgcctcccaaacaaattgcatcggaagtggtaacgccgattgtgctgattacactggtaacatagcattggctcacgcgcttacccacagttgcggtaaagttgatgcgtatgccttcattgttgcggttgctgatttttacggcatttgggctgacgcccaaggcaaacgcggcacgttcctgaagtttctagtcggaaacggttacattattgattgagccgcaacctgctaatgccaacgcaacgaacgcagccgaaacgatgatgcgtgtgttcataatttcctcgaaaattaaaaatgaaaacaggaaaacgattcttacgtgaagcagaaaaaatgtcaatagaattatatttcccacttaaaatctggaaagctattctctatatttcagacggtatatcccgcaaaattaaggccggtaatctatgcccaactgctccagcaggtggccgaacgtttcaggcgtatcgaaatacaggacaatcctgccttttttgtggttggcggttttgacttcagcgttgacacccagtttttcagtcagcaaatcattcaggcggccgatgtcggcggcggcagtctttttgggctcgggacgtttgttttgaagggcggcctggctgcggcgttcgacttcgcgcaccgaccagccgtttttgacggccttttgcgccaattcgagctgttcgacgacgggcagggtcagcaatgcgcgggcgtgccccatttcgaggcggcgttggtaaagcatttcctgcacgggttcgggcaggcttaaaaggcgcaggctgttggaaatcgcgcttcggcttttaccgacggcttgggcgatggtttcgtgggtcagcccgaactcgtcggcaaggcgtttcaagccttgtgcttcttcgatggggttgaggttttcgcgctggaggttttcgatcaaacccattgccaatgcggtttcgtcgctgatggttttgataacggcggggatttcggtcaggccggcaatctgtgcggcgcgccaacggcgttcgcctgcaatcagttcgtatcgggacagtccgtgttcgcgcacgatgacgggctgtatcacgccttgcgccttaatcgaatctgccagttcctgcaaggcttcgtcatcgatttgaacacgcgcctgatagcggccgggccggatatctttaaccgcaaccgtggtcaatcggtcgccgctgctgttgtccgcgccgttggcgagcagcgaatccaagccgcgccccaatccgccttttacttttgccataccgccctcccgtgcctattcagataggatgttaaatcgggtattttatcggatattgggtgttgccgacaatttgtatccgcgtttatcggatttctgttttttcactataatagccggtttgccgttgcaggcggttttatgggaaaggcggatgatggtacggcgtttgataatcggcatcagcggggcgagcggtttccaatacggcgtgaaggctttggaacttttgcgcgcgcaagatgtcgaaacgcaccttgtggtatcgaaaggtgcggagatggcgcgcgcttcggaaacggcttatgcgagagacgaggtatatgccttggcggacttcgtgcatccgatcggcaatatcggggcgtgcattgccagcggtacgtttaaaacggatgggatgctggtcgccccctgttcgatgcggacgcttgcctctgtcgcgcacggcttcggcgacaatctgctgacgcgtgcggcggatgtggttttgaaggaaaggcggcggctggtgctgatggtgcgcgaaacgccgctgaaccttgcccatttggacaatatgaagcgggtaacggaaatgggcggcgtggtgtttccccctgttcctgcgatgtaccgcaaaccgcagacggcggacgacatagtggcgcacagtgttgcacacgctttgtcgctgttcggaatcgatacgccggattcggcggaatggcagggaatggcggattaaaggacaaaaatgccgtctgaacacggatacagttcagacggcatcattttatacgactgccttatttggctgcgccttcattccatgcggcaggggatttgtagccctcgaagcgtttgtgcgcgtaggctttgaacgcgtcggagttataggcctcggttacgtctttaagccattggctgtctttgtcggcggttttgacggcagaccagttgacataggcaaagctcggttcttggaacagggcttcggtcagcttcatgccgctgcttatggcgtagttgccgttgacgacggcaaaatccacgtcggcgcggctacgcggcagttgcgcggcttcaagctcgacgattttgatgtttttcaggttctcggcgatgtccgctttggatgcggtcaacggattgatgccgtctttgagtttgatccaacccagttcgtcgagcatcaccaagacgcgggcgaagttggacgggtcgttgggcgcggatacggtgctgccgtctttgacttcttccagcgatttcagcttgcccgggtacagtcccaaaggcgcggtcggcacttggaagacttcggtgatgtccagattgtgttcttttttgaagtcgtcaagatagggtttgtgttggaagacgttgatgtccaactcgccctcagccaatgccagattcgggcgtacatagtcggtaaactcgaccagtttgacggtgtagccttttttctccagctcggcttggatttgttctttgaccatatcgccgaagtcgccgacggtcgtgccgaagacgatttcttttttcgccgcgccgttgtcggcggcggcagaagcggatgcggcgggcgcgctgtctttttgaccgccgcaggcggcgaggatgagcgcgagtgcggcggcggaaagggttttgaagaaggttttcatattttctcctgatgttgtggcagtttcaaacaaaaatgacgggcagggagtcctgccgtccggattcggcgttcagacggcatttgccgcgaacagggggattttatagcatttttcggatagcggtgggggttttggcgttcagacggcattcgggttcaacgtttgtcgagtttccgcgccaacgcgttgccggtgctttgaatcaggatgaccagcagcacgaggagggcgacgatgaagatgatgacttcggtttggtagcggtagtagccgtagcggatggcgaggtcgcccaagccgccgccgcctatcatccctgccgccgcgctgtatgacaaaagcccgatggcaagcacggtaatgctggaaaccatgcccgcgcgcgcttcgttcaagaggactttgcagacgatggcaatcggcggcgcacccatcgcggcggcggcttcaattacgcctttggggacttcgcgcaggttttgttccaccagtcgggcaaaataaaacaatcccgacacgctcaacaccagcgaggcggcaaccggaccgatggtgctgccgacgatggcgcgtgtggcgggtatcatcgcaatcatcaggatgacgaaggggaaggcgcgcatgaggttgacgaggttgtcgagcaggaagttcaccagcttgttgtaatgcagttggcggctggaggttacgaagagcagcacgcccagcagcgtgccgaagatgacggcgaatgtggtggacaagccgaccatcacgaaggtttcgcccaaggcgcggaagatttcgtctttcatgccgacgatggtggaaacggcttgttggaatgttaagtctgccatatcagtcctcccgaatcagttcgcgcccgatgtcggattgggcgtggatttggttgccgcgtacttcgacgatttcgacgactttgcctttatccaagagggcggcgcggtcgcacaggcggcggatgacgctcatttcgtgggttacgatgacgatggttacgttgaagcgtttgttgatgtcttccaaacattccaagacgctgcgcgtggtggcggggtcgagggcggaagtgggttcgtctgcgaggatgacttggggtttgggcgcgagtgcgcgggcgatgccgacacgttgtttctgcccgccggaaagctgggcgggatagtggccggcgcgttcggtcaagccgacgatttcaaggcattctttaacgcgcgctttgattttttcagacggccatccggcgatttccaaaggaaaggcaacattgtcggcaacggtgcggttgctcaaaagattaaactgctgaaacaccatgccgatattctgccgagcctgacgcaatgcggcggcatcgagcgcggtcagctcttgtccgcagacgttgaccttgccgctgtcggggcgttccaacaggttaatcaggcgcaacagggtggatttgcctgcacccgaataacccatcagcccgaagatttcgccgtcgcggatttcgaggctggtcggctcgacggcggcaaaacgggtcttgtcgcgcgtttggtaatgcttggaaaccttgtccaaaataatcattgtctttcccatacaacaaagcccgatgtcggacacaacgggcgcggaagataaagctgaaattgtcggaacgctttagctgttatgcccgcaagctgtgtcaaatcggcaggttaattttcgtaggatattatcgggaaagcatttttttgtcaataaagcaggaagcgggcaaccatttcggacaatgccgtctgaaacgggcaaaggcagcggttcgcaccaaaacggcaaataattgaaaaacatatagtggattaacaaaaatcaggacaaggcgacgaagccgcagacagtacaaatagtacggaaccgattcacttggtgcttcagcaccttagagaatcgttctctttgagctaaggcgaggcaacgccgtactggtttttgttaatccactataaattatgtcggaaacattccaaaggcggtgcagtttcggcatataattcgggcaaacgcctgttcagacggcattttgtcttttccaaccctgaccgttcagggttccgattcttaaggaaatccgatgtacctaccctctatgaagcattccctgccgctgctggcggccctggtgcttgccgcgtgttcttcgacaaacacactgccagccggcaagaccccggcagacaatatagaaactgccgacctttcggcaagcgttcccacccgccctgccgaacccgaaagaaaaacgctggcagattacggcggctacccgtccgcactggatgcagtgaaacagaaaaacgatgccgccgtcgccgcctatttggaaaacgccggcgacagcgcgatggcggaaaatgtccgcaacgagtggctgaagtctttgggcgcacgcagacagtggacgctgtttgcacaggaatacgccaaactcgaaccggcagggcgcgcccaagaagtcgaatgctacgccgattcgagccgcaacgactatacgcgtgccgctgaactggtcaaaaatacgggcaaactgccttcgggctgcaccaaactgttggaacaggcagccgcatccggcttgttggacggcaacgacgcctggaggcgcgtgcgcggactgctggccggccgccaaaccacagacgcacgcaaccttgccgccgcattgggcagcccgtttgacggcggtacacaaggttcgcgcgaatatgccctgttgaacgtcatcggcaaagaagcacgcaaatcgccgaatgccgccgccctgctgtccgaaatggaaagcggtttaagcctcgaacaacgcagtttcgcgtggggcgtattggggcattatcagtcgcaaaacctcaatgtgcctgccgccttggactattacggcaaggttgccgaccgccgccaactgaccgacgaccaaatcgagtggtacgcccgcgccgccttgcgcgcccgacgttgggacgagctggcctccgttatctcgcatatgcccgaaaaactgcaaaaaagcccgacctggctctactggctggcacgcagccgcgccgcaacgggcaacacgcaagaggcggaaaaactttacaaacaggcggcagcgacgggcaggaatttttatgcggtgctggcaggggaagaattgggtcggaaaatcgatacgcgcaacaatgtgcccgatgccggcaaaaacagcgtccgccgcatggcggaagacggtgcagtcaaacgcgcactggtactgttccaaaacagccaatctgccggtgatgcaaaaatgcgccgtcaggctcaggcggaatggcgttttgccacacgcggctttgacgaagacaagctgctgaccgccgcgcaaaccgcgttcgaccacggtttttacgatatggcggtcaacagcgcggaacgcaccgaccgcaaactcaactacaccttgcgctatatttcgccgtttaaagacacggtaatccgccacgcgcaaaatgttaatgtcgatccggcttgggtttatgggctgattcgtcaggaaagccgcttcgttataggcgcgcaatcccgcgtaggcgcgcaggggctgatgcaggttatgcctgccaccgcgcgcgaaatcgccggcaaaatcggtatggatgccgcacaactttacaccgccgacggcaatatccgtatggggacgtggtatatggcggacaccaaacgccgcctgcaaaacaacgaagtcctcgccaccgcaggctataacgccggtcccggcagggcgcgccgatggcaggcggacacgcccctcgaaggcgcggtatatgccgaaaccatcccgttttccgaaacgcgcgactatgtcaaaaaagtgatggccaatgccgcctactacgccgccctcttcggcgcgccgcacatcccgctcaaacagcgtatgggcattgttcctgcacgctgacgtaccgatgccgtctgaaacccgcccggtctttcagacggcatttttatcccgaacggcattgacggcgaaccataaatataagacaatccgaaaattgtttttcctgctttttcaagcagcttgacacggcacaagccgacccgttaggaggtgatgtttccgtcacggcgcgtatcccgccgccgcaaggcacagcgatacggtaaactttcaacaccgtctgccctaccctttccaccgatatgatgggcagatgaaacaaccgaatttattaaaggaaataaaatgcctgcaatccgcgtaaaagagaatgaaccatttgaagtcgctatgcgccgtttcaaacgcgccgtagaaaaaaccggcctgctgaccgagctgcgcgcccgcgaagcctacgaaaaaccgactaccgaacgcaaacgcaaaaaagcggcagccgtaaaacgcctgcaaaaacgcctgcgcagccaacaactgccgcccaaaatgtactaaacgttcaagtacagattacaggtcagccctgtgatatgaggacacaccgcaagacctgctctgcggtgtgttttgcttttcagacggcatcgaaacccgccgtttccatccgacatcccagcgaggacatcatgagcctgaaaatccgccttaccgaagacatgaaaaccgcgatgcgcgccaaagaccaagtttccctcggcaccatccgcctcatcaacgccgccgtcaaacagtttgaagtggacgaacgcaccgaagccgacgatgccaaaatcaccgccatcctgaccaaaatggtcaaacagcgaaaagacagcgcgaaaatctacactgaagccggccgtcaggatttggcagacaaagaaaacgccgaaatcgaggtactgcaccgctaccttccccaaatgctttccgccggcgaaatccgtaccgaggtcgaagctgccgttgccgaaaccggcgcggcaggtatggcggatatgggtaaagtcatggggctgctgaaaacccgcctcgcaggtaaagccgacatgggcgaagtcaacaaaatcctgaaagccgtgctgaccgcctgattgcccgaatatcggacaaaatgccgtctgaagcccgtatcgcaggttcagacggcattttcaatatcccaatatcgaatcggcaggggcaacacggttttgatacgccgaaacgggttttgccgataaacagattccgtttgcgccccatcggacaaaatgccgtctgaaacacgattccgttcagacggcatagatttatttgaccaatttcaagccttttttggcgggtcggggcgcggtttcggcagaggtgttttcaggcggcgtatcggggcggtacgcttccaactcaaaccccataccttctccggtctcccgtgcgaaaaggctgaggacgtgtccgacaggtatccatatatcgtgcgcctgtccgccgaagcgggcggaaaagctgatccaatcgttgtcgatttgaaggttttgcgtggcggtcgcgccgatgttgagcataatttcgttgtcgcggacgtactgcatggggacgcgcgtgtgttcgttgacccagacaaggatgtgcggtgtgaggctgttgtcgctgcaccattcgcagagggcgcggaggatgtagggtttggtggaagtgggcataatgggttccgtgttgtacgccaaaataggaaaatgcctgcaaaacggtgggttttgcaagcatttcggacttatttgcgcatggctttttcggcgggtgtcagtgcttcgataaaggcttcgcgctggaagatgcgctcggcgtatttgagcagcggcgcggcacttttgcccagtttgacatcgtagtggtcgagccgccacagcagcggagcaagggcgacatcaatcatagaaaaatcttcgccgaggatgtatttgcttttgctgaacgaaggggcaagcatggtcagaccgttgccgatggcttcgcgcgcttttgcctgttccttgttggtggcggcggggttttctaacacttggacgtggttgaacaattctttttccatacggtacagcaccagccggccccgaccgcgcataacgggatcgccgggcatcagctgcggatgggggaagcgttcgtcaatgtattcgttgatgatattggactcgtgcagcaccaaatcgcgctcgaccagcacgggaacttggttatacggattcatgacggcgaggtcttcgggtttgttgtaaatatcgacgtctttgatttcaaaatccatacctttttcgtacaaaacgaagcggcagcggtggctgaaggggcaggtaatgccggaatagagggtcatcataataattgtcgctcctgtgtgatgcctgcaaaacggctgatttatagtggattaacaaaaaccagtacggcgttgcctcgccttagctcaaagagaacgattctctaaggtgctgaagcaccgagtgaatcggttccgtactatttgtactgtctgcggcttcgtcgccttgtcctgatttttgttaatccactatataaaggtttaatcgcgcaattatacgcgatttccggcacttaatccagaaattcggctcaatctgttgttttttatatattttccccgattttccgtatcagtgcgaacttactgtctttgttgcgcggacgcgcaccctgccaaaccgtctgccagccttgcggcgcatccgcattttggggcaggaggacgatgcggtagcggcattgtacatcgccgacgcggtgcggcaatgtgccgtactgcgtccaaacaatccgcgtgtgcaggtcgccgccgcctatgccgatacactcgatgccgtctgaaagctcccgtttcaattccggggaaagcgatgcctccatactccggacgaccggcgcgtggcttttcgccgcgtccagccacggcaggaacagcgtcatcagcaaagcccaggtcagggtaacgcctgccgcccagttggtaaccgcctgcctgccgcgtatgtttttccgggtaatcgcccacagccacaagggtgtgaacagtacggcaaccgccatcggaatgggatcgatatcaggaacataatacgggctgaaataggcggcgcgttcggcaagcttggcgggccagccgtaattcatggcgaaaaagcccgtccacaggaacacggcaaacagtccgaacgccataatgccgaaccagttgacaaacgccgccgcgccgcgcctcaggctgtccagttgcgccgcgccgaacagggcaagcggcggaagcagccagacgaggttatcctgaaaacgctgcggattgacggcaagcagcaccaaaacggcaagcatccagacgacgcccaaaatcccccagtcggtcgaaaacaggcgcgtgcggcaaaccgtccaaaccgccagcggcagcgcgggcaatgcaaaccaaagcaggtttttcagatagtaaaacaaactgaatgccgtctgaacgtgccgcacgccgccgaacgtaccgaaaacgtgatagtcgagccattgcgcgaacagcgcgggctgcgtttttgccaagagcagcgggtaaacggtcataagcggcagggcaaaggcaagtgaggcgactgccgtcaacatcaaacgcctgctttgccacggacggaaaaacatcagtacgggcaagggcagcatcagggcaaatgctgccggataagctgctgccaacgacatcagcgtccagcccgtaccgagcagaaaagaggcggcaatcacgcgccggcgagccaaagaataaccgtgcagcaccagtccggcggcggcaaaggcggcggcagcggggttgaggaaatgggcaactggaatcagcccgatacagccgatgagaatcaggacgacgctgcgcccgtggtgtctgcccaaaaagttgaaaccggcaaagccgcaggaagtcagtccgataacggcaaaaaatacgcctgcaaagcgtgcggcatcgtatgagtcggcagcccacggcgacagcaaatgtttgaacgcggcggcaacccaaagatacacgggcggtatgccgaaatcggtttgaccgaacagatgggcaaccaagggggtggggctgcctgccagtgcttcgacggcggtatagacggcaggttcgtcaggattccacaaatcgtgggaaaacacgccgggccacaaccaggcaaacgccatcaacagcagcagccacggcttttcgtgggttttggcgggcgggcgggcatcgggcggggtataggtcagcataagcgtgagaaaaaatggacggattgccaagtgtagcaaatattcgcacaaaggtcgtgcagagactgcttcagacggcatcagacacaaaaagaccggcaacaaaaaagactgcacatggcagtctttgcagatactatctttttcataatattttttcctagcccaacacagtccatagcatatcaaaactgttgttttcaaccaggatatatatccccaatcctaaataaacaacagcaacaaaccatctgctatatttttccaaagtttctccaacagaagggacttgtgctaatttttgggcagaaaaaaccaagagataaatcatgactagaaaggtaagtaaagccactatcaaattcgctaaatttaaggtagtaaaatatgggacaaagacaccaatattgtcagcaccacaacttgcaaaagtaatcatagcgactagaaaaatcaggtttttattatctttgcgcaaaccctctttggcaatagcctctccatcagaatctcctaaaagcaaaactttgatgcctaggagaattggaatcaagccgagcaaacctaaaatctctttactaggaatataatctaagacaaatgcaaaaagtaaacttagcaatatcagactaacagagcctagaaattgtcctaaatagatgttaatgatgtcttttctactttttcttttggcaaaaaataacattaggataataagtaagtctacggctgtcccagaatacaggattattgaagtaacgacattttgaatcataaaacatctcattcaaatatatttttaaatgtattcaaacattaaaccttgtagatgtcaacttcaaccccgtcaaaatatagtggattaacaaaaaccagtacggcgttgcctcgccttagctcaaagagaacgattctctaaggtgctgaagcaccaagtgaatcggttccgtactatttgtactgtctgcggcttcgtcgccttgtcctgatttttgttaatccactatatagataagaagtcagtgtgccaaatattaaaaagccctgccatcgaaatgatggcagggcttaattcttgcaaagcggcaatcagcgtttgaacaggttgccgaatttgttgttgaatttgtccacgcggccggtggtatcaacgattttttgggtgccggtatagaacgggtggcacagggagcaaacctcgatattgaagttttctttttccatcgcggatttggttgcgaatttgttgccgcaagagcaggtaacgttgacttcgtggtagttcgggtgaataccttgtttcatttgatttcctttcaaaaaagcgggcataggggatgtacctatgctacagacaagtccgacattctcgctattttctgttgttacgtcaagagtatattcgataaaatgtatagtggattaacaaaaaccagtacagcgttgcctcgccttgccgtactatctgtactgtctgcggcttcgttgccttgtcctaatttttgttaatccactataaaaagttcttttgagggaggtttgatgggatcaaaattctttttcctgctgctgcgttttgccggttcggggttgccgccgtcacatatgcgcggcatcggcatcgtcggcagacgggtgcgcggttttttggcgcggcgggtttctccgcatatcggacgcggggtcaatatcgaacgcggggcgtatgtgtttccggatacggttttgggcgacggctcgggcatcggggcaaactgtgaaatctgccgtgggctggtggtcggcaaaaatgtgatgatggagccggaatgtctgttttattcaaataaccacaagtttgaccgttcaaaaaacgctttgagggctacacggaaatccgtccgattacgttggaggacgatgtctggccggggcacagggtgattgtaatggcgggcgtaaccgtcggacgcggttcggtcgtgggcgcagcgcggtggttacaaaagacattccgccctactctttggcggcaggcaatccggcagtggtgaaaaagaatctgccggaaggttgaatgccgtctgaacgtgtcggggcggatgatctgaaaaaacaggaacatcgtttctgttttttgcgcttcagacggcatcgctattgcgccacgcggtatcgatttcttggtagagtttgccgaaatcgggttcgccgacgtaggttttgaggatttcgccttttttgccgataaggacggaagtcggataaacctgtgtgccgaacgcctgtccgacagctttgtccgcatcatacatgacggtaaacggcaaaccgtagtctttgacatattggcggacgctttctatcggatcgatgggctgggcgacggcaagtacttggaagtttttgtttttatagtcatttgccgttttaatgattttgggcatttcgctcacacaacccggacaggagggaaaccaaaaattaatcagggttactttgccttgcaggtcggcgttggaaacggtttttccgtgcaggtcgggcagggagaaggcgggcgcggttttgctgtcggggatgaggacgatggcaaggaggatgccgatcagtgcgacgacggcggcggtgagtatttttttcattcggacaaggcttccaatgcgcgggcaagggtggcgggcaggctgacggtgcgttgtgtggcggcgtggacgggcatcagggtgatgtcggcttctgcggcggttttgccgtttggcagtgtaatcgtctgggtcagcacaatacggcgcgtgccgggggttttcaggcggcatgaaaactgcaatacgtcgccttcgacggcggggcggctgtatcggatgtcgatgcgggcgacaatcagtatgaggcctgccaactcgtgcagcagtccgcgttcttcaaaaaacgcccagcgcgcttcttcgaaaaattcgaggtagcgcgcattgttgacatggccgtagccgtcgagatggtagttgcggacggtcagcttcatcagttcaggttgatgggttggaaggcttcgcgggcaagcggttcgtgttcgaggtcggtgatgacggtagaaagctggatgtcgaaccattcgttgaaaatgtcggcatcgagcgcaggccactcgcgttcgtcttcgcaccagtcggcaagttcggcggcgaaaatgtcttcaaaacgggcttcgatttcgtcccatacttcgtcggcggtttcgcacgggcggacaaggtaggaattggcgtcggcttggatgtcttcaagagtcagtccgtcgaggtggttgcccggcagggtttgcagccagttccaaaaaggttctaaagggatgaggacgaatacgctgcggttgacttcgtacatggtttttcctttgctgtcgcgcggtatgcgcaaaaaagagattatagcccaatctgtggtttcggactgtccgttccgacagaagggaatgccgtccgaacacggattttcagacggcatggctttaaggttgtgttccaggttgcgtttcggcttcccctgctgcttctgcctgtgtttcggatacggaatcttcttgaacggcagtttccgccgcgccggtttcggcactttcgaccaattcgtcgatgtcgatgttatcttccgtaccttcggcaggtgttgcaccggtctgccgcgcacggactttcatatagaggtcgcgcgtgtagctgtatttgtcgatggcggcttcgtccagactgtcggtcaaatcgagcaggccttcgcgcgtactgacggcggatacggcagtcgtgccccagcgtccgacaggggtgcggaagacgatattcttgggcgaataaacggaggtaatacccgtgccgagcgcgtcgcggacggtggacggccctaagacgggcaacacgaaataattgctgtttttccatccccacgaggcaaacgtgtcgcccaaggtgtttttattgtcgggaatgccgcccgcgccggcgatgtcgataagcccgcccaaaccgaaagtggtgttgatgccgacgcggacaaggtcttcgcttgcgcgtttgatgtccaagcgcaagatattgctgccgaagctgaccacgtcgcacaggttgttaaaaaaattggacacgccggcgcggacgggtttcggcgcaactttgcggtagccgcgcgcggcaggggcgaaaatgtagcggtcggcttggtcgttgaatttgaaaacggcgcggttgtagccttcataagggtcggcggggcgggtttcggcaaatgcaggggcggaagcgaacccgatcagcaggaggaaggcataggcggtttttttcatgatttcagccagtctttgatttcgtacagttcggacagcgcgcgcacggattcgggaatgccggtcagcctgacgctgcctttgcaaccgcgcagcacttcgagcagcagcgacacgcaggcggaatcggcgcgtccgacgccgctcaaatcaaccgcgcaggtgtctttcagacgacattgctgtctgaagcgggtaaaagcggcggcggtcagggttttgacggtgatgtcgccgccgatgtgcaatattccgtttttgagttctgtatgcatagcgtttgctcggaaaacccataccgccctcggacggtatggtttgtcggttatttgccgccgtttttggctttcaactcggcaatcagtccgtccacgcctttcgctttgataatttcgccgaattggttgcggtacacggtaaccaggctcgcgccttcgatggcgacgttgtaggtacggtatttaccgccgctttggtaggtggtgaagtccatgttgacgggtttttgcccgggtacgccgacttcggcgcggacgatgatttctttgccgcctttattgacgatgggattgtctttgacgttgacgttggcgttttttaatttcagcatcgtgccggaataggtgcggatcagcagggtttgaaattctttggccaacgcttgtttttgcgcgtcggacgcggtgcgccaagggttgccgaccgccaatgcggtcatacgttggaaatcgaaatagggaatcgcataggcttcggctttttggcgagcggtgttggcatcgccgttttttaagatgctcaatacttgagtggcgttttgacggatttggcttaccgcgtcggcaggggcggcaaatgccatgccgatgctcaaaataccgatgcccaatgcgctgatgagggaggattttttcatgattaagtgtcctagtttgaatatgatggcatacgtttattcggcggctttttccgcattgccgccgtcggcatttttctcggcaaaactcgtcatgaatttgccgataaggttttccagaaccattgcagaactggttacggagatggtgtcgccggcagcaaggttttccgtgtcgccgccctgctgcagcccgatgtactgctcgcccaaaagtcccgaagtcaggatttgcgcggaaacgtcgctgctgaactgatacttgccgtccaaatcgaggcgcaccctcgcctgataggatttcgggtcaagtccgatagcgccgacgcgcccgaccaatacgcctgcggatttgacgggggcattgaccttcaaaccgccgatgtcgccgaaatcggcataaacggcgtaagttttgtccgaaccgccgaacgccgcaccgccggccacgcggaaagcgagaaaggcaaccgccgccgcgccaatcaggacgaacagtccgacccaaaattccaatatgttctttttcattaaagttccttgaatatccgatgttccgcgtttcgtcttcagacggcctgtcaatctgtaaacatccacgcggtcaatataaaatcgaccgccaaaatcgtcagggcggacgaaaccaccgtgcgcgtgctggcgcgcaaaatgccttccgaagtcgggacgcaatggaagccctgatgcacggcaatcagcgttaccgccacgccgaacgcggcggatttgatcagaccgttgattacatcgtaatgtatcgtgatgttgttctgcatttgcgaccagaaaataccgctgtccaagcccagccaggttacaccaaccaaatacgcaccgaaaatgcccgccacgttgaaaatcgaagccaaaagcggcatggaaaacacgcccgcccaaaagcgcggcgcaaccacgcgggcgacagggtttaccgccatcacattcatcgcttcgagctgttcggtcgttttcatcagaccgatttcgctggtcatcgcaccgcccgcgctgctggcaaacaaaatcgctgccaataccggacccagctcgcgcaatagcgaagccgcgaccatatagcccaaaatatcggcggatttgaatttcgacaactgcgtatagccctgtaaacccaagaccatgccgacaaacagccccgaaacggcaacaatcaacaccgacagcacaccggcgaaatacacttggcgcacgctcaggcgcggacggacgaaagccgtaccggacttcgccagaatgttcagcagaaacagcgtgatactgccgagggattgaataaggccgagggttttcgccccgacggaacggataaagttcataaatttctatgtgtaaagttcaacggtttcagacggcatcaactcatttatcccaacaggtcctgctgcaacgacgtttgcgccggataacggtatgctacggggccgtctgccagcccgccgacaaactggcgcacccaaggcgaatccagttcgcgcatttcctgcggcgagccggagaacataatttcgccgtgcgccaagaaaatcacctgatcgacgatttccaaagatttttcaatgtcgtgcgttaccataatactggtcgaacgcaaagccttgttgacgcggctgatcaagtgggcaatcacgcccaaggaaatcggatcgaggccggtaaacggctcgtcgtacaacataatttcagggtcgagcgcaatcgtgcgggcaagcgcgacgcggcgcgacatcccgccggacaactcggacggcatcaggttttccacaccgcgcagaccgaccgcgttcaatttcaacaaaaccaaatcccgaatcaccgcttccggcaggcgcgtcagttcgcgcatcggaaaagcgatattgtcgaataccgacaaatcagtaaacagcgcgccgtgttggaacaatacgcccatacggcggcggtgttcatacaactcgtcagccgaaaagcccgccaaatcccgtccttcaatcaaaacctgcccggactgcggacgaatctgtcctgtaatcagtcgcatcagcgtggttttgccgctgcccgaaccgcccattacggcagcaaaattgccttgcggaatgctgaaattgatgttcttcagaatcgggcggtcgccatacgcgaaggcgacgtctttcatttcgataaagggggatgggctcatgtacggacggacggtaggtttgacggcgtgtattttaaggcttatcgggaagacgggcaattttcagacggcatacggacggtaaatgttgtgaaaatgccgttgtcggcggcggattgtttgctgtggcgaaaaatgttatctttcaaatgataacctttatcagaaaactatggaaaaagcagaacatttgaacagcagccggttcgtcaatctagtcaaaagcggcggcggcagctatgtggagggcagctaccgtttcgatactttgtccaacggcatttccatccacggcggcacagtaacggcacggtgtgatttttgcagcagccgcctcgccgaaccttatgtgtcgttcgtgctcttgctggaaggcagtttggacttcggcatcaaccgctgccgcttccaaatcgatgcggacggcggcaagattgtcctaattgctgtcggggaagaagtcctgttcagccgctatctttaccgaggcggcaaaacggtcaaaatgaccattaaaggtatggaacaatggctgctgcgtccggaatacgcgcgtttcgcacccctgctttaccgcgaaccggtcaggatatgggatttgcccccgaacctgcgcggcttggcggcatcctgcctgaaagccgtcccaaaggggcatttgggcgaaacattgcgccgcgaggcggacgtgttgcggctgctgtcggacttgtgggacacggtttcagacggcatcgggccggcggcggggcaaacggcggaagcagacgctatgccgtctgaagacttcagccgcaccctaaatgccgcgtttgccgacggcgcacaccaagtcaaccggctgacagacgcgctgaacatcagtgaaaggacgctgcaacgccgtatgcgcgaccatttcggcattacggcaagcgaatggctgcaccacaaacaaatgcagcacgcgctctatctgttgcaaaacgggggaaaaagcataggcgaaaccgcatatttatgcggctaccgccacgtttccagctttactcaggcattcaggcaatatttcggcagcacgcctgcggaaaccaaaaaagaaaaccggtaagccgcatttgatttcaaacccgaaatccgcgtgtatagtggattaacaaaaaccagtacggcgttgcctcgccttagctcaaagagaacgattctctaaagtgctcaagcaccaagtgaatcggttccgtactatttgtactgtctgcggcttcgtcgccttgtcctgatttttgttaatccactataaaaaacttgtacggcaatttatttgggaataaactaaaactacatctaactacaaaactggagaacccgaaatgaaacaattggccatgtacatcaacggacgctttgaaaacgatttcaacggcgaatggcgcgacgtattgaacccgtccaccgaagaggccatcgcccgcgaacccaaaggcggcaaggcggacgttgaccgcgccgtcgcggcggcgcgtgcggcgcaaccggcttgggagcgtctgcctgcggtcgaacgcggcgcgtatttgcgtaaaatcgcccaaggcatacgcgaacgtgccgacgagctgaccgacaccatcgttgccgaaggcggcaaaaccaaagacttggcacgcgtggaagtcatgttcaccgccgactatctcgattatcaggccgaatgggcgcgccgctacgaaggcgaaatcatccaaagcgaccgcccgcgcgaaaatattttattgttcaaacgtccgctgggcgtaattgccggcattttgccgtggaacttccccttcttcctgattgcccgcaaaatgggccccgctttggtaacgggcaacaccatcgtcgtcaaacccagcagcgtaaccccgatcaactgccacatcttcgccgaaatcgtcgatgcggtcggactgcccgcaggcgtgttcaacgtggtgaacggtcccggcgcggaaatcggcaatgccttgtccgcccatccgcaagtcgatatggtcagcctgaccggctccgtcgaagcaggccgccaagtgatggaagccgcctccgccaacatcaccaaagtttcgctggaactcggcggcaaagcgcctgccatcgttttgaaagatgcggatttggacttggcggtgaaatccatcttggcttcgcgcgtcggcaacaccggtcaaatctgcaactgcgccgagcgcgtctatgtccacagcagtctgaaagacgcattcattgaaaaaatgaccgccgcgatgaaaggcgtgcgctacggcaaccctgccgaagccgaagcaggcgcgctggaaatgggcccgctgattgaagaacgcgccgtcaaagccgttgccgaaaaagtggaacgggcagtcaaacaaggtgcgaaattggtttgcggcggcaaacgcgccgaaggacgcggttatttcttcgagccgaccctgctgaccgacaccgacaacagtatggacattatgaaagaagaaaccttcggccccgtgctgcccgtttccgctttcgacacgctcgaccaagtcatcgccttggcaaacgattgcgagtttggtctgaccagttctgtttatacgactaatttaaacgaagccttctacgttacccgccgcctgcaattcggcgaaacctacatcaaccgcgaaaactttgaagcgatgcagggtttccacgccggttggaaaaaatccggtatcggcggcgcggacggcaaacacggtttggaagaatatctgcaaacccaagtcgtttatttggaaaccgacatttaatgccgctttaaaaccccgatagaaaatgccgtctgaacccgttttcaggttcagacggcatttttattgcttcaccggcaatcagtcatgaccgaggtcgatgtttttgtctttgtatagtggattaacaaaaatcaggacaaggcggcgaagccgcagacagtacaaatagtacggaaccgattcactcggtgcttcagcaccttagagaatcgttctcttcgagctaaggcgaggcaacgctgtactggtttttgttaatccgctatattccgccatctctaagatttacagcgatacacgggtaatttaaggaatgcccaaaccgtcattcccgccacttttcgtcattcccgcgaaagcgggaatctagaatctcggactttcagataatctttgaatattgctgttgttctaaggtctagattcccgcctgcgcgggaatgacaaatccatccgcacggaaacctgcaccacgtcattcccacgaacccacatcccgtcattcccacggaagtgggaatctagaaataaaaagcaacaggcatttatcggaaataactgaaaccgaacagacctagattcccgcctgcgcgggaatgacggctgcagatgcccgacggtctttatagcggattaacaaaaatcaggacaaggcgacgaagccgcagacagtacagatagtacggaaccgattcacttgttaaagaatcgttctctttgagctaaggcgaggcaacgccgtactggtttttgttcatccactataactagggaaattcaaattaagttagaattatccctatgagaaaaagccgtctaagccggtataaacaaaataaactcattgagctatttgtcgaaagttcaaatttccattttaaaacaattagtaaaatcgagtttatcctagttgtccaagacaacccctataataatataattcaaaatataaaaatgggttacatctaaacattacggaatttttattccctcgcctgaattctattgtcagattcaaggagacctcatcatgcgaacgaccccaaccttccctacaaaaactttcaaaccgactgccatggcgttagctgttgcaacaacactttctgcctgcttaggcggcggcggaggcggcacttctgcgcccgacttcaatgcaggcggtaccggtatcggcagcaacagcagagcaacaacagcgaaatcagcagcagtatcttacgccggtatcaagaacgaaatgtgcaaagacagaagcatgctctgtgccggtcgggatgacgttgcggttacagacagggatgccaaaatcaatgccccccccccgaatctgcataccggagactttccaaacccaaatgacgcatacaagaatttgatcaacctcaaacctgcaattgaagcaggctatacaggacgcggggtagaggtaggtatcgtcgacacaggcgaatccgtcggcagcatatcctttcccgaactgtatggcagaaaagaacacggctataacgaaaattacaaaaactatacggcgtatatgcggaaggaagcgcctgaagacggaggcggtaaagacattgaagcttctttcgacgatgaggccgttatagagactgaagcaaagccgacggatatccgccacgtaaaagaaatcggacacatcgatttggtctcccatattattggcgggcgttccgtggacggcagacctgcaggcggtattgcgcccgatgcgacgctacacataatgaatacgaatgatgaaaccaagaacgaaatgatggttgcagccatccgcaatgcatgggtcaagctgggcgaacgtggcgtgcgcatcgtcaataacagttttggaacaacatcgagggcaggcactgccgaccttttccaaatagccaattcggaggagcagtaccgccaagcgttgctcgactattccggcggtgataaaacagacgagggtatccgcctgatgcaacagagcgattacggcaacctgtcctaccacatccgtaataaaaacatgcttttcatcttttcgacaggcaatgacgcacaagctcagcccaacacatatgccctattgccattttatgaaaaagacgctcaaaaaggcattatcacagtcgcaggcgtagaccgcagtggagaaaagttcaaacgggaaatgtatggagaaccgggtacagaaccgcttgagtatggctccaaccattgcggaattactgccatgtggtgcctgtcggcaccctatgaagcaagcgtccgtttcacccgtacaaacccgattcaaattgccggaacatccttttccgcacccatcgtaaccggcacggcggctctgctgctgcagaaatacccgtggatgagcaacgacaacctgcgtaccacgttgctgacgacggctcaggacatcggtgcagtcggcgtggacagcaagttcggctggggactgctggatgcgggtaaggccatgaacggacccgcgtcctttccgttcggcgactttaccgccgatacgaaaggtacatccgatattgcctactccttccgtaacgacatttcaggcacgggcggcctgatcaaaaaaggcggcagccaactgcaactgcacggcaacaacacctatacgggcaaaaccattatcgaaggcggttcgctggtgttgtacggcaacaacaaatcggatatgcgcgtcgaaaccaaaggtgcgctgatttataacggggcggcatccggcggcagcctgaacagcgacggcattgtctatctggcagataccgaccaatccggcgcaaacgaaaccgtacacatcaaaggcagtctgcagctggacggcaaaggtacgctgtacacacgtttgggcaaactgctgaaagtggacggtacggcgattatcggcggcaagctgtacatgtcggcacgcggcaagggggcaggctatctcaacagtaccggacgacgtgttcccttcctgagtgccgccaaaatcgggcaggattattctttcttcacaaacatcgaaaccgacggcggcctgctggcttccctcgacagcgtcgaaaaaacagcgggcagtgaaggcgacacgctgtcctattatgtccgtcgcggcaatgcggcacggactgcttcggcagcggcacattccgcgcccgccggtctgaaacacgccgtagaacagggcggcagcaatctggaaaacctgatggtcgaactggatgcctccgaatcatccgcaacacccgagacggttgaaactgcggcagccgaccgcacagatatgccgggcatccgcccctacggcgcaactttccgcgcagcggcagccgtacagcatgcgaatgccgccgacggtgtacgcatcttcaacagtctcgccgctaccgtctatgccgacagtaccgccgcccatgccgatatgcagggacgccgcctgaaagccgtatcggacgggttggaccacaacggcacgggtctgcgcgtcatcgcgcaaacccaacaggacggtggaacgtgggaacagggcggtgttgaaggcaaaatgcgcggcagtacccaaaccgtcggcattgccgcgaaaaccggcgaaaatacgacagcagccgccacactgggcatgggacgcagcacatggagcgaaaacagtgcaaatgcaaaaaccgacagcattagtctgtttgcaggcatacggcacgatgcgggcgatatcggctatctcaaaggcctgttctcctacggacgctacaaaaacagcatcagccgcagcaccggtgcggacgaacatgcggaaggcagcgtcaacggcacgctgatgcagctgggcgcactgggcggtgtcaacgttccgtttgccgcaacgggagatttgacggtcgaaggcggtctgcgctacgacctgctcaaacaggatgcattcgccgaaaaaggcagtgctttgggctggagcggcaacagcctcactgaaggcacgctggtcggactcgcgggtctgaagctgtcgcaacccttgagcgataaagccgtcctgtttgcaacggcgggcgtggaacgcgacctgaacggacgcgactacacggtaacgggcggctttaccggcgcgactgcagcaaccggcaagacgggggcacgcaatatgccgcacacccgtctggttgccggcctgggcgcggatgtcgaattcggcaacggctggaacggcttggcacgttacagctacgccggttccaaacagtacggcaaccacagcggacgagtcggcgtaggctaccggttctgacggacaggaagcagacagccgcaaagatcacggtctttgcggctgtttcttatgaaaagaaaaccctattccaattgcctgcttctattgtttcaagacttcttccaaagattcggcattaatcagatgtatagcggattaacaaaaatcaggacaaggcggcgaagccgcggacagtacaaatagtacggaaccgattcactcggtgcttcagcaccttagagaatcgttctctttgagctaaggcgaggcaacgccgtactggtttttgttaatccgctatattccaccatctctaagatttacagcgatacacgggtgatttaaggaatgcccgaaccgtcattcccgccactttccgtcattcccgcgaaagcgggaatctagaatctcggactttcagataatctttgaatattgctgttgttctaaggtctagattcccgcctgcgcgggaatgacgaatccatccgcacggaaacctgcaccacgtcattcccacgaacccacatcccgtcattcccacgaaagtgggaatctagaaatgaaaagcaacaggcatttatcggaaataactgaaaccgaacagactagattcccgcctgcgcgggaatgacggctgcagatgcccgacggtctttatagcggattaacaaaaatcaggacaaggcggcgaagacgcagacagtacagatagtacgaaaccgattcactcggtgcttcagcaccttagagaatcgttctcttcgagctaaggcgaggcaccgctgtactggtttttgttaatccactatacttggagctggtcttgcttttcgcctaattctacgttttcaaacggttgcagctggtggtctgccataaaggtctccttattgtatttcaggttggaaatcggaatttgttttcacaattttacaccttcgcccccgctttctctacataaaattacattttgccgatatttgccgaattgtctgaaaatatgtgtaataaggggcgtataatcaaaacatttgccccggattgccatgccttatttcgccctgtttgacgatgccgtaagcggccgcgcaaaacgctatcaaaatcatgtggaaagccgttttttccgtcccgaagaactcgatgctttggacggcgcgctgcaatcgggctggcaaaaagggctgcattcggtgttgtttgcagactacggattcggtttgccgctgacgggggttgagtccgaacgcggcggcaatcttgccctgcactggtttgccaactgcgccgacatcgatgccgaaagctggcttgcccgacactcagacggcctccccgccggcatttccacgccgcaaccctccgtatccgaaaccgattacctcgaccgcatccgccaaatccacgaagccatccggcgcggcgacacctatcaaatcaactacaccacccgcctgcacctgcaagcctacggcaatcccgtcagcctctaccgccgcctgcgccagcccgtcccctatgccgtcttgtcccacctgcccgatgcggaggggcaatccgcgtggacgctgtgtttctcgcccgaactcttcctcaaaatcggttcggacggcaccatcagcaccgaaccgatgaaaggcaccgcgccgattttgggcgacggacaagacgaacgccgcgccgccgagttgcaagcagacccgaaaaaccgcgccgaaaacgtgatgattgtcgatttgctgcgtaacgatctcggcaaaatcgcccaaaccggcacagtatgcgtacccgaaccgtttaaagtatcgcgtttcggcagcgtttggcagatgaccagcaccatccaagcccaagccttgccgcacacctcgttcgccgacatcctccgcgccgccttcccctgcggcagcatcaccggcgcgcccaaaaaaatgagtatgcagattatcgaatcgctcgaagccgaagcgcgcggactttatacgggcagcatcggctatttgaacccgtgttccggcggcttggggtttgaaggcacgttcaacgtcgttatccgcaccttgtcgctcacgccgctttcagacggcatttatcaaggcgtgtacggtgtcggttccggcatcgtcatcgacagcgaccccgccgccgaatatcgcgaatgcggctggaaagcccgtttcctcaacgaattgcgccccgacttcggcatttttgaaaccctgcgcgcggaaaacggacgctgcaccctgctcgaccgccacctatgccgtctgaaaacctccgcccaagccctcaacctgcccctgcccgacggctgcgaaaatcaaatcaaacaatacattgccgacttgcccgatggcgcgttccgcgtcaaagccctgctcgcttcagacggcatcagcctgtcccgcgccgttttaaaccgtctgaccgacaaacaacgcgtcatcatttcgcccgccgtcctgcccgcacaaaactacctgcgccgcttcaaaaccacctgccgcgccctcttcgaccaagcgtggcaaaccgccgaaacacaaggcgcgttcgacagcctgtttttcaattcagacggcatcctgctcgaaggcggcagaagcaacgtcttcatcaaacatcgcggacaatggctcacaccctctttagatttagacattttaaacggcataatgcgccaagccgtattggacgaaccgcaaaaatatttgcaaacaaatcaagtaatcgaaacacacatcacacaaaaaacactgcaagaagccgaagaaatccgcctctccaacgccttgcgcggcgtatttgccgccgcccttgcctgaacgcgcaaaaatgccgtccgaacctgtttccaaagttcggacggcattatcccaccattcaaaaccgccaatccgccgacacaaacacctcgctgttgcggcgtttcgcatacggcacattactttccgtcctgccgaaacgataattcaacgccggcacgatacctttgtacgacaacttgtcgtggctcaaagccagcgagacattccattcgcggttgcgttgcgcctctgtcgagaaagccgcaatgcccttatagttgcggcgggcataagacgcggaaacccgactgttcaaaccgcccaactgccgccactcctgcgcccaaccggcataaacaccgttgcgccggtaggcggcattattgaccgcgccgcccaccgtttcgcgtttcggcacaaaccgcacaaactgccagccgccgaacacagttgccgattcgcccaaacgttttgccgacgaaacataaaacccgtcctgcctgccgttattgtattccgccctatcctgttcgcggtagcgttggcggtaatgttccagcgcgaccgaaaattgccatcccgggtttgggcggtaagtatgggacagctgcacgccgactccgtgcgccagcatatacggcggcaggcggcggttgtttacccgttttgttttcgcatcaaagccgtcgctgcccgacaactgcacctgataaaacggcaaaatccccgccgtctgccgtgcatttttatactgccaacccaaatacgccctgccgaacccgtcatcataagctgattttttactgaaataatagctcgtgccgccgatattggaacggaacaacaaataatgattatctgccaacggcgtcagcttttccgcctcgatttcataattcaaccctgccgcccgctccgcccggctgacactgcatatctgccggcctccgttttgccggcaatattgcggcgcggcattattggcatttctattgaccgccggactgatgccgcccgaaaaacgccagcccgtcagcccctccgtttttttccgaaaacgccccacattttccaaaaccggtgccggcaaatccaattttgccgcctccgcaaaatgcctttctgccgacttcagccggaaatcgtcaaactccgccgccgccaaatccagcaaaatccgctcgtctgccgcattttccccgtgcagttcccgataccgcgccaccgcctccgccggccttcccgccaatttcgccagcaaagcccgcgccctgccgtacaaaaccgcgtcataatccggcagcttggcatacaaatccgccaacgaagcgattaaatccgcctgattgccgttgagcgcgtcgcgcaaactatgttccaacattttcggatgcgccaacaaaaaatccccgtcaaccacgcgcggggcatcattttcaactttccaatctgattccgcccacttatccgacaccgaccgctgcacctgcaacaatgccttgtcatccaaaatcgcgggcgcatccgccccataggcggcagaaacacctgccgcacaccaaacaaccaaaaagccgtatctgaaatacaacataccctgtcatttacctttctggcaaacacgccgccgaagcacgtcaaaccatccgaaaaacaggcagaaacccgtgaaaaccggctttgccgcctgaaagcaggcaaacaaaaaccgccgcccgattttcaaagggcggatttcacatttatagtggattaacaaaaatcaggacaaggcgacgaagccgcagacagtacaaatagtacggaaccgattcactcgtgcttaagcaccttagagaatcgttctctttgagctgaggcgaggcaacgccgtactggtttttgttaatccactataacagcaaccctgtcgccgtcattcccgcaaaagcgggaatgacgaagctatccgcacagaaacctgcaccacgtcattcccacgaaagtgggaatccagaacgtaaaatctgaagaaaccgttttatccgatacgtttccgcaccgacagacctagattcccgctttcgcgggaatgacggcggaaaggttgctgtttttccgataaattcctgccgctcttcgtttttgggatggcgggaaataaaacaaaagcgcgcgtatcaaaaaacaaaaatgcaaagaacggcgttggcaattttaaggtttgcgccttagccgcacttattcgcaaaaaaaaccgcacggcgttgaccgtgcggttttttatctgaaagcttcagacggcattgcttacatcatgccgcccataccacccatgccgcccatatcaggcacagccggtttgtcttcggggatttcagcgatcatgcaatcagtggtcagcatcaagccggcgatagatgcggcgtgttgcagcgcagaacgggttactttggcggggtcgagtacgcccatttcgatcatatcgccgtattcgccgctgccagcgttgtaaccgtagttgcctttgccttccaatactttgttcacaaccacgctgggttcgccgcctgcgttggcaacgatttggcgcagcggagactcaacggcgcgcaagacgatttgtacgcctgcgtcttggtcggcattgccggtgtgcaggttttccaaagcagcacgggcacgcaacagggctacgccgccgcctgcaaccacgccttcttcaacggctgcgcgggtagcgtgcagcgcgtcttccacgcggtcttttttctctttcatttcgacttcggtcgcggcaccgactttgatgactgccacgccgcctgccaatttagccacgcgctcttgcagtttttctttgtcgtaatcgctggttgcggtttcgatttgttggcggatttcggcaacacgcgcttcgatttgggctgcgtcgccaaagccgtcgatgatggtggtgttttctttaccgatttcgatgcgtttggcttgacccaagtcgtccaaagtcgctttttccaaagacagaccgacttcttcggaaatcaccacgccgccggtcaggatggcgatgtcttgcaacatcgctttgcggcggtcgccgaagccaggggctttgacggcaacggttttcaggatgcctcggatgttgttcacgaccaaagtcgccaaggcttcgccttctacgtcttcagcgataatcaacagcggacggctggcttttgccacttgttccaaaacaggcagcaggtcgcggatgttgctgatttttttgtcgaacaacaatacaaacggattgtccaaagcagcgatttgtttttccgcatcgttgatgaagtaaggagacaggtagccgcggtcgaactgcataccttcaactacgtccagctcgttttccaaagacttgccgtcttcaacggtaatcacgccttctttgccgactttttccatcgcttcggcgataatcgcgccgacttgttcgtcggagttggcggaaatagagccgacttgggcgatttctttagaagtgtcgcaaggtttggcgatgtttttcagttcgtcaaccaaagcggcgacggctttatcgataccgcgtttcaggtcggtcggattcatacctgcggtaacatatttcataccttcggcaacgatggattgcgccagtacggtggcggtagtcgtaccgtcgcctgccacgtcgttggttttggacgcaacttctttcaccatttgcgcgcccatattttcaaacttgtctttcagttcgatttctttggcgacggttacgccgtctttggtgatgtgcgggccgccgaatgcgcggtcaacgactacgttgcgacctttggggcccaaggttacgcggacggcgtttgccagaatgttcacgccgtttaccattttttgacggacttcattgccgaactgtacgtcttttgctgccatttcaattctccaaaaatcattaaaactgtctgataaaaccgtttatgccgtctgaaggcggtttgccgtttcagacggcatcgtgtccgtatttatttttcaacgatgccgaaaatatcttcttcgcgcattaccaacagctcttcgccgtcggcttttacggtttggccgctgtatttgccgaagatgattttgtcgccgactttgacatccagcggacggcggctgccgtctttaccgattttgcccgcgcccacggcgatgacttcgcccatatcgggtttttcggcggccgcacccggcaaaacgatgcccgatgcggttttttcttcagcttccaagcgtttgacgacaacgcggtcgtgtaaaggacggatggtcatatttatgctccgataaaatagtttgaaaacaatcatctgcccgaacggttcaggcagattgaagtggaaaccggacagccgtcaagcagctgcccgtataagtcggcaaaattagggtgtgtgcgggtaaattcaagtgaggcggaaaaaatttatttccgccgttttttatagtggactaaatttaaggggctgtactagattagcagatatgttaccctcgaaatatgaagataacgcactgcaaattaaagaaaaaagtacagaaagaactgctccgttttttgtactggaagttaccgcccgttctgccgccgatattttgggtatccatcccaattcggcagcactgttctaccgtaaaatccgcacggttatcaaccatcatttagccttggctgccgatgaggtttttgagggccctgtcgagccggacgaaagcgatttcggcggacggcgtaaaggtagacgtggtcgcggtgcagcaggaaaagtggttgtcttcggcattctgaaacgcaacggacgggtctataccgttgtggtggataatgccaagtctgaaacgttactccctgtcatcaagaagaaaatcatgccggacagtattgtttataccgatagtctgagcagctgcgacaagttggacgtgagcggtttcatttattaccgcatcaaccattccaaggaatttgcagaccgtcagaaccacattaacggcattgagaatttttggaatcaggcaaaacgtgtcttgcgaaaatacaatggaatcgatcgtaaatctttcccgctgttcttgaaagaatgcgaatttcgatttaacttcggcacaccgtctcaacagcttaaaatcctgcgggattggtgtgggatttagggctaatctagtacagcccctaaaatttttcgttttcaagccttcaccgcttgccatcagcgttaaatttttttacgataagcacatagattgtaaacaatcggccacaagccggtttgttttttcagaagacattatccctgtcagacgctatttctatatatttcgcctataatggcttgtttttaataaataattcaagaggtatcaacgtgtctgattccaagacgaaagaacgcgccacattcggcacgcgccgcgcgtttatgattgccgccatcgggtccgccgtcggcttgggcaatatttggcgtttcccctatattgcttttgaaaacggcggcggcgcgttcatcctgccctatctggtcgcgcttctgacggcgggcatcccgctgctgctgctcgattatgccatcggccaccgttaccgtggttctgcgcccttggctttccgccgcctcggacgatggtttgagccggtcggctggtggaacgtgatgaccaatatcgtcatctgcatctattacgcggtaattatcggttgggcggcaagctatacctattattcggtcaacgccgcctggggtgcggatccgcagggttttttctttaaggacttcctgcaaatggcgggcccggaagccttgggtttggattttgtcggcaaagtcgccggtcctttggcgggcgtgtgggtttttaccgccgccattatggcgttgggcgtgcaaaagggcgtggcgcgcgcctcgtcgttctttatgccgctgcttttggtgatgtttttgattatggtcggcatttcactaaccctgccgggtgcggcaaagggcttggacgcattgtttacgcccgactggtcgaaactcgccgattccaaggtctgggtggcggcatacgggcagattttcttttcgctttccatctgcttcggcattatggttacctattcttcttatttgaagaaaaaaaccgacttgggcggaacggggctggtggtcggttttgccaacagcagctttgaactgctcgcgggcatcggcgtgtttgccgcattgggctttatggcgcaggcgggcggtaaggcggtcaacgaggttgcctcaggcggcatcggtttggcgtttatcgcctttccgaccattatcaaccaggcaccgatgggctggctgatcggcatattgtttttcggttcgctggtgttcgccggcgttacgtcgatgatttccatccttgaagtgattgtggcggcgattcaggacaagctgaacatcgggcgcgtcaacgccacgctgctggtctgcattccgatgggcattgtttccacgctgctgttcggtacggcgacggggctgccggttttggacgtgatggacaaattcgtcaacacctacggcattgttgccgccggctttgtttatgttgccgccatcatcatcagcggcaggctgccggaattacgcaagcacctgaacgctttgtcctccatccgcatcggcggcttgtggacggtctgcgtcgtggttaccgtcgtgatgctcggctatatgctgtttaaagataccagcggcctgatggagaaaaattacgaaggttatccggatggtttcctcagtattttcggctgggggatgtcggcggcgttggtcgtgttcgggctgctgctgtcgttgctgccttggaaacacggtcaggatttcaacgtcaaagacgaacacgaacatgaacaaggagaagaaaaatgagtacttccgccattgtgatgatgattgtctcaatcgtgataatctggggagggctgctgctttccctgttaaggctgccgaacgagtaagcctttagagcgttaaaaatgccgtctgaaccgcttcagacggcattttgatgttcggcttgcaggcaggcgagttcgtttgccatttgctgttccaaggtttcgcgccggcggatgagtcggtattcgttgccgtccaccaacacctctgccgcacggttgcgcgcgttgtaattgctcgccatactggccccgtatgcgcccgcgctgcggataagcagcaaatccccttcttcgcaggcgatggtgcggtctttgccgaggaagtcgccggtttcgcaaatcggaccgacgatgttggcggtcagcgtcgcgatgtctttggtttcgaccgcctcgatgtgatgataggcatcataaagcgccgggcgcatcaaatcgttcatcgccgcatcgaccatcacaaagtttttctcttcgccgtatttgacaaactcgacgcgtgtcagcagcgaacctgcgttgccgaccaggctgcggccgggctcaagaatgagtttcagacggcgtgtgccgatcagtttttgaacggcttgggcatacgcgcccaaatcaggcacattttcgtcttggtaaacaatgccgacgccgccgcctaagtctaaatgttccaaaacaatgccttcggcggcaagcgcgtcaaccaaaatcaaaatgcgctcgcaggcttcgaccagcgggcttaagtcggtcagttgcgaaccgatgtggcagtcgatgccgatgattttcaaattgggctgttgtgcggcatagtggtaggcttcgagcgcgtcggcgtaggcgatgccgaatttgttggctttcagacctgtggagatgtagggatgggtttttgcatcgacatcggggttgatgcgcagggagacgggcgcggttttacccaaacgtgcggcaactttctgaatacggtcgatttcggggatgctttccatattgaagcatttcacgcctgcattcagcgcgaactcgatttccgcctcgcttttgcctacgcctgaaaatatggtttttgccgcgtcgccgcctgccgccaaaacgcgtgccaattcgccgccggacacaatgtcaaaaccgctgcccagcgaggcgaagtgtttgataatgctcagattgccgtttgccttgacggcgtaacagacgagcgggttcaaagcggcaaacgcggtttggtagtgttcaaatgcttcggtcagcgcggattggctgtacacataaagcggtgtgccgaatgcttcagcaaggcgggggtaggggacttgttcgcaaaatagggtcatgttttcgttttcatttttgggtttgtggagcggattgcggtttgctttgaagttgcaaaccggtttggattacgccgaaacgcgccttgtcgccttctttgggcaggtagaggtcgcctttgtaaccgcaggccgagagcaggagggcggttgccgccgcaaaaaatacgccgtatttcatcggtaaacttccttcataagcgcgaatgtggcaagattcggcatcttaaacaaaaaacacgcaaaaagctatgatgaccgaaagcgagtttatccgcgcgagcgaagcattatttgaacacatcgaagaccaaatcgacgaaaacggctgggatttcgactgccggtttgccggaaacgtcctgaccatcgaagccggagacggcgcccaaatcatcgtcaaccgccacacgcccaatcaggaattgtggattgccgcaaaaagcggcggctaccatttcgccgagcaaaacggcaaatggctggcaacgcgcgacggacgcgatttttatgacgttttaaacgaagccctgagcgcggcttcgggcgaagcggtggaaattgcggaattgtgatttgggtgttatcacggaaagaaaaaatgaacacacgtcccttttatttcggactgatatttatcgcgattatcgctatacttgctaactatttaggaaacactgatttttcccatcattatcatatcagtgctttaattattgctatcttgctgggaatggcaatcggcaataccatttatccgcaattttcgacacaagtggaaaaaggcgttttgtttgccaaaggcgcgcttcttcgcactggcattgtgttgtatggttttcgcctcacttttggcgatattgccgatgtaggattaaatgcggttgtcactgatgcaatcatgctaatttcaaccttcttttttaccgcacttttaggcattcgttatctaaaaatggataaacaattggtttatctcactggggcaggttgcagcatttgcggtgcggcagcagtgatggcggcagagcctgttactaaagcagaatcccataaagtttcagtggcgattgccgtagtggtcattttcgggacgcttgctatttttacttaccccttgttctacacgtggtcacaacatttaattaacgcccatcaattcggtatttatgttggttctagtgtacacgaagtggctcaagtgtatgcgattggggaaaatattgatcctatcgtggcgaatactgccgtcatttccaaaatgatccgagtgatgatgctcgccccctttttattaatgctttcttggttattaacacgtagtaatggagtatcagaaaatacatcacacaaaattacaattccttggtttgctgtactttttattggtgttgccatttttaattcttttgatttattaccaaaagaactcgtgaaattattcgttgaaatcgattctttcttattaatttcatcaatggctgcgcttggcttaacgacgcaagcaagcgcaatcaaaaaggcaggattaaaaccgtttgttttaggaatactaacttatttatggctagtggttggtggatttttagtgaactatggaatatcaaaattaatataaaattcactaaagagagcgttacccaatggcacaattaccgctatatctgacttctgaaatcaaagactttactgtcggcacgcctaaagttttagaatcattttccaaacatatcccttatggtgtcgtctttgaagacgacggcgacacaggctacttctatgccgcttcgcaagacgggattttagatgccttgcacatctataatgtcgaagatgtatccgacaaacatatccccaatcatgtcttgattttatgggatgatgcctgcaccatagccgcattgtgtatcaacgactacattcatgccgtctatgattttgtcgaacaggcaggatattgccgcaacggcttccctgaagcaggcggcgaatgggtgaaagtcgaaaaccgcgtcttggatgatgaattgctggacaaaatcctatcccgaaaatctacataaccctcacaaaaggatacccaaatgcccctactagacagtttcaaagtcgatcacacccgtatgcatgcccccgccgtacgcgtggcgaaaaccatgactacgcccaaaggcgacaccattaccgtgtttgacctgcgcttttgcgttcccaacaaagaaatcctgcctggaaaaggcatacacacgctggagcatttgttcgcaggttttatgcgcgaccacttgaacggcaacggcgtggaaatcatcgacatttccccgatgggctgccgcaccggtttttatatgagtcttatcggcacgccttccgaacagcaggtcgccgatgcgtggctggcttcgatgcaggatgttttgaatgtcaaagaccaaagcaaaatccccgagttgaacgaataccaatgcggcacttatcaaatgcactcgctcgccgaagcgcagcaaatcgcgcaaaacgtgttggcgcgcaaagtggcggtgaacaaaaatgaagagctgacgctggatgaagggctgctgaacgcctaatccgccaaaaatgccgtctgaacaagggtttcagacggcatttgccttttccgttataatccggggttgtccgggggcgggttttaagccggcatcgtccttccctatttttttctgtcccttatcggttttaagcgggttttttatgtccaacagacctacactcctcctcgttgacggatcgtcctacctctaccgtgcgtatcacgcgatggggcaaaacctgaccgcccccgacggcgcgccgacgggtgcgctgtatggtgtattgaatatgttgcgccgtttgcggtcggaatatccgcacgattattgcgcggtggtttttgatgcgaaaggcaaaaatttccgccatcaaatgtttgaagaatacaaggcgacgcgcccgccgatgcccgacgatttgcgcccgcaggcggaagcactgccggatttagtgcgcctgacaggctggccggtattggtgattgggcaggtggaggcggacgatgtgatcggcacgctggcgaaacagggggcggaacatggtttgcgagtcattgtttcgaccggcgataaggacatggcgcagttggtggatgagcgcgttacgctggtgaacacgatgagcagcgaaacgctggacattgaaggcgtgaaggcaaaattcggcgtgcgccccgaccaaatccgcgattatctcgcgctgatgggcgacaaggtggacaacgtgccgggcgtggaaaaatgcggcccgaaaacggcggtgaaatggctggaagcctacggttcgctggctggtgtgatggaacacgcttcggaaatcaagggcaaagtgggcgaaaacctgcaagccgcgctgccccaactgccgctgtcgtatgatttggtcacgattaaaaccgatgtggacttgcacgccgagctttcagacggcatcgaaagcctgcgccgtactacgccgaaatgggcgcagctggttgtcgatttcaaacgctggggcttccgcacctggctgaaagaagcggaatcaaacatgaataccggctcgaccgatgatttgttcggcagcgacagcatcggcgagcaggcggctttgaatgcggaaatgccgtttgaaaaacaagccgaaaaagccaccgcccccgaaaaactggattatcaagccgttaccaccgaagcgcagtttgccgctttgttggacaaactgtcgcgggcggacacaatcggcatcgatacggaaaccacgtcattagacgcgatgaacgcctcgctggtcggcatcagcatcgctttccaagcaggcgaagcggtttacatccccgtaggacacagcctgaccgccgcgcctgaacagcttgatttacaagacgtattaggccgtctgaaaccgcatttgggaaaccccgccctaaaaaaaatcgggcaaaacctcaaatacgaccaacacgttttcgccaactacggcatcgccctgaacggcattgccggcgacgccatgctcgcttcctacatcatcgagagccatctcggacacggcttggacgaattgtccgaacgctggctcggcttggaaaccattacctacgaatcgctgtgcggcaaaggcgcgaagcaaatcggttttgccgatgtcgccatcgggcaggcgaccgaatacgccgcccaagacgccgatttcgccctgcgcctcgaagcgcacctgcgcgcgcaaatggacgaaaaacagcttgaaatgtatgaaaaaatggagctgcccgtcgcgcaggtattgtttgaaatggaacgcaacggcgtgcaaatcgaccgcgccgaactcgcccgccaaagcgcggaactcggcgccgagctgatgaagctcgaacaggaagcctatgccgccgcaggccagccgttcaacctcaattcgcccaaacagctgcaagaaatcctgttcgacaaaatgggcatccccaccaaaggcctgaaaaaaaccgccaaaggcggcatttccaccaacgaagccgtgctcgaacagctcgcgcccgactaccccctgcctaaaatcatcctgcaaaaccgcagcctggcgaagctcaaatccacctacaccgacaaactacccgaaatgatttcccccaaggacggccgcgtgcataccacctacgcccaagccgtcgccattaccggccgcctcgccagcaacaaccccaacctgcaaaatatccccatccgtaccgaagaagggcgtaaagtccgccgcgcctttaccgcaccgcaaggcagcgtcatcgtttccgccgactattcccaaatcgagctgcgcattatggcgcacctctccggcgacaaaaccctgattgccgcgttccaaaacggcgaagacgtacaccgccgcaccgccgccgaagtgttcggcactgcgcccgaaaacgtctcgtccgagcaacgccgctatgccaaaagcatcaacttcggcttaatttacggtatggggcaatacggtttggcaaaatcattgggcatcgacaacctttccgccaaaaactttatcgaccgctacttcgcccgctaccccggcgtcgccgaatacatgcagcgcaccaaagaacaagccgccgcccaaggctacgtcgaaaccctgttcggcagaaggctctacctgcccgacatccgcaacaaaaacgccaacgcccgcgccggagccgaacgcgctgccatcaacgcccccatgcagggcaccgcctccgacctcatcaaacgcgccatgatagacgtgtcccgctggctttcagagtgcgaagcctccccgtgggacgaactcttacaaagcaaactgattatgcaggtgcatgacgaactggtgctggaagtcgttgaaaccgaactggattttgtcaaagaaaaactgccgcagattatggcgaaagtggacggcggattattggatgtaccgctggtggctgaggttggcgtaggggagaattgggaagaggcacattgattgaaaggtgttatatgctatctttatttaaataaaatttaatttttggtatattttttctaaatgttcctatagtatagtggattaacaaaaatcaggacaaggcgacgaagccgcagacagtacaaatagtacggaaccgattcacttggtgcttcagcaccttagagaatcgttctctttgagctaaggcgagacaacgctgtactggtttttgttaatccgctatattccgccatctctaagatttacagcgatacacgggtgatttaaggaatgcccgaaccgtcattcccgcaacttttcgtcattcccacgaaagtgggaatctagaaataaaaagcagcaggaatttatcggaaataactgaaaccgaacagactagattcccacctgcgtgggaatgacaattcgagacctttgcaataacataggttactaaaattttatgctcaatctcattttcaaaatgcaaaacttttctgatttttcctactttttgctcaatattaggaaggttttaggcaattgaaaattttttggcgcatttttatgcgtcaaatttcgttaacagactatttttgcaaaggtctcaattcataagtttcccgaaattccaacataaccgaaacctgacaataaccgtagcaactgaaccgtcattcccgcgcaggcgggaatctagaccttagaacaacagcaatattcaaagattatctgaaagtccgagattctagattcccgctttcgcgggaatgacgaaaagcaagccgtaggtcggatacttgtatccgacaaaagcctgccatctcaaatagccgtcggattcgagaatccgacctgccaaaccgggcgcggacgctccggccggcagttagtacgcaaatcgaacagaacatcacaaaaaagcccgattcggattttccaatcgggcttttttgcgcccgttttgtcatcccgtgaaatatccgcatgacaaaaatatagtgaattaacaaaaatcaggacaaggcgacgaagccgcagacagtacagatagtacggtaaggcgaggcaacgctgtactggtttaaatttaattcactataatgcaaaatcatgacaaaaccggcgcgaggttacacaaacggatgaaatcaaccgatattcaaacacagtcatttttagcgcattttcagcgtatcgttaatgcggaaaatttcgtgaacaggttttttgcacaggcctccgcctcgtttcgcgggatgggaaaccgtattagaaaacggacgcacgcaacataaaccccgaaagtgatgataagatgatgatttaacgtactgctttaattatttaaggaattatcgtgtttcccgacaaatacaagttgagtttgaaagaaaatatttttttggcaaagaaagtattggttgcccaaattcacaacctcagtcgttttgagaattgtcagacgaccttgttgcagaccgaacaaattatccatggcaaaaatgtagcctccgcgtcactggaagacatccaaaccatcttgaacctgaaacgtgcctatcaatatgtgatttcgcatatttcaaacggcgaaccggtcgatatttcactccttaaaaaaatcaacaacattgttgccaaggacgattctttggcacccggtgatttccgtaccggttcggtcggcgtaacgctattggacggttcccgtcatgccccgaatccagtgaaggaaattgaagtggcccgcgtgttacaaaatatcggactgcaaagcggttcgacgacggaggcagccgtccgttttatgctttattgtatgcggcagcaggttttttgggacggcaacaaacgaacggcaaccttatttgccaacggtctgatgatggcggggggctgcggcatcttggaaatctccgaaatgcagatgccgcaattcaatgaaaaactgtccgcattctatcgctccggcgacgataccgatatttccaagtttgtgtatcaaaattgtatatcgggcatagactgagacctttgcaaaattccccaaaaccccttaaattcccaccaagacatttaggggattttccatgagcaccttcttccagcaaaccgcccaagccatgattgccagacacatcgaccgtttcccgctattgaagttggaccaggtgattgattggcagccgatcgagcagtacctgaaccgtcaaaaaacccgttaccttagagaccaccgcggccgtcccgcctatcccctgctgtccatgttcaaagccgtcctgctcggacaatggcacagcctctccgatcccgaactcgaacacagcctcattacccgcatcgatttcaacctgttttgccgttttgacgaactgagcatccccgattacagcaccttatgccgctaccgcaaccggctggcgcaagacgacaccctgtccgaactgttggaactgattaaccgccaactgaccgaaaaaggcttaaaagtagagaaagcatccgccgccgtcgttgacgccaccattattcagaccgtcggcagcaaacagcgccaggctatagaagtcgatgaggaaggacaaatcaacggccaaaccacaccgagtaaggacagcgatgcccgttggataaagaaaaacggcctctacaaactcggttacaaacaacatacccgtaccgatgcggaaggctatatcgagaaactgcacattacccccgccaatgcccatgagtgcaaacacctgccgcctttgttggaaggactgcccaaaggtcgaccgtctatgccgacaaaggctacgacagtgcggaaaaccggcaacatctggaagaacatcagttgcaggacggcattatgcgcaaagcctgccgcaaccgtccgctgacggaaacgcaaaccaaacgcaaccggtatttgtcgaagacccgttatagtggattaaatttaaatcaggacaaggcgacgaagccgcagacagtacaaatagtacggcaaggcgaggcaacgccgtactggtttaaatttaatccactatatgtggtcgaacagagcttcggtacgctgcaccgtaaattccgctacgctcgggcagcctatttcggactgattaaagtgagtgcgcaaagccatctgaaggcgatgtgtttgaaccttttgaaagcggccaacaggctaagtgcgcccgctgccgcctaaaaagcagcccggatgcctgattatcgggtgtccgtggaggattaagggggtatttgggtagaattaggaggtatttggggcgaaaatagacgaaaacctgtgtttgggtttcggctgtcgggagggaaaggaattttgcaaaggtctcagactatttcggcacggacgaagatatagatttccccgacccaccaaacatgggctaaaaatcaatttgacggttatcagacaatggagcaggcacaaggcggcggcagaaaaagggtttgacagcgcacggtggcatcgtcagacccctttcggcatatccggcggttaccagcggtagcctaatttgatgcccgcgctgtgttgcgcttccagttgcgggcctttggcggcggcagcgtggagggacagcgtgaaacctttgatttcggcgtttacgccccattccgcactgcgggttttgccgaaatcctgagccaatacggcggtattgacgcgtgttcggactttgcccgaagcggcatcggtataggacaggctcaaataaggcgtgatggaaatgtgttgcgccggtttgaatgaataatctgccttaatgcccgcgcggtagcggttgaatgcaaggccgggggtggcgatattgacgttttcgtagcggtaatccgctttttggacgaaatagcgcgttgcgccgatgtgcggttcgatgccgaatccgccgaaaccggcgcggtatcgtgcctgaatgccgtaatgcagcacgcggcggcggattttgcctccgatgccgtctgaaaggctgccgctgctaaaacccgcgcccgcgctgatgccgatgtagaacctgtcgatgccgtattgcccgaaaacggcgccgtgggcaagccgtgccgagttgccgatgccgtcgtcgaaggtgttttcggtccggttgtgcgaaaacaggatgccgacgcgcccgctgccgaggtttttctgcataccgatttggcgcaggtcggtttgttggcggtaggcgcggaaatcttgcgaacggtagtgtttggtgtcccggatgccgcttgtccaaacggcgttgcggcggtcttcggcaaatacgcggtctaattcgtcctgtacggcgaaaacgctgttgagcgtggcggaaaattcactcaaaccgctattggcataacggctgatcaggtcgcgctgcggttggggctgcggttggggttgcagttgcggcaaatcccggcgggcgcggcgggcgcgggggaaggcggtggtagccggccgggtttccgcttcgcgctgtttcgccaaggcggtgtctttatccgcctgcacccgttttttctcttcctccgcctgcataatgccgacattttccccgcctgcctgccgggccggttcggcaacgctttctgtcttttcgacggcatcgcgcccggccgcaatcagcgcgtcaaggctttgcgcgttgtctttttccgcctgttttttggcttctgccttgccgagtttgtcggaaagctcttgttctttgaccggattatgcaggcggaactcgccgtctttgcggatgagttggtaacgccacgcgccggcatcgacgtgttcgttttgcagggtgaaattaaggttttcggacagcggtttgttgtcttttccttccactaccgtcaattgttcgaggcttgcaggttcgttgccggtattgttgaccgccaaggtgtaagtgccttcggaactttccgccagcttcaatttgtcgctgcggtagccgaagagttccgacataaagcggaatgttccctgaccgttcaatttgccgtttaccgtcagcgtgttgaaacgggattctaccgaagttggcggtgtaacggataatagggaacggcgcgaacggcgcgaacggcggcgcggcgcatctgtcgcactgccggtttgcgcccctgccgcatcgtggcgataggcggaattgagtgtaatggtggcgttgtcaaggtttaaattgcctaattccgtgcctgacggcagcgtccattcgctgtcttttaagtgtaatgccgtatccttgccgccgctgatttgtccggtaaagcggctgctttcaaaatggaatactgccttatcggctagggagacattaccgttgagtgcggaatggcttacgtttgccttagcgttgccggaaagcgtcagactgccgttttgtacggcgtggtcgcttagattaaatgaagcattgcccgaagccgatgtgttgccgtttaatgtggcttgattaaatgttgcttgggcattgcccacgaggctaaggttgccgttttgggtggcgttgtggctgactgtataacgtgtatcgccatttgcactaagattgccgttgagtgtggcaagccctgtgagatttaaatgagcgtgatcggcaagatcgacattgccgctgatgtcggtcttagtcaatgaagcaatcactttatcgtcggtaatggttttttcgacacaatttgtcagacccgtccagtccgaacgtgtacagattgtgtggctttgatgcggtgcgacaccaaaaactgcttgggcgtgattgctcaaatgccaatcgcctttcactttggcaacattgcgggaaaccaccgcctgtccgcctttaatttggaagttttccgctttaaatgtgcggttgatccagtcgttgtcccacacgatttccccgcgaggaatgccctctttttgcgaccaatggtcgtttaaatgattgtaggcgtgcggtgttggtctgccgctgaaaaacagtttgccgtttgtttgcgtgatgttgccgtttaaatttgttccgccggaaagcagcagggtgcggtcttctgcggcgggctggtaaacaaggttgagccgcccgttcgttttggtcgtatctttctcgccaaaccaaccgttgtaggcaatttcttttttgctatccaagctgttgttattgccggttgtagcaatatctttattgcctgtaatggtaacggtggattctttgtcttgattgtggttgacaatcatcgccccttcatcggtattttgaatacggtggaacgaaagcgaatgcccgtttaaatccaaacgtccgccgcgaaagccgaaatagagtttgtcggggttgaactgattatcggcattcagttgcaccgtacccctgccgctgaccaagccgatttcactaaaggcttgttttttgcctttatcgtctgcctgctgatccaaaatgactgtaccgtcgcccacgctgatcgagccttggttttcccctttggcttgaacgtgcagcgtgcctttgccgattttggacaggcggtcgtttgccacgccgtttactttccaagtaacggtactgtcttcactgatatgaacgcccgcgccttgccaagtttcgttattttcaggcgagaccgtaaaatctccttggaaatataatcctccagcaccttgattgatgttgctggtaagtatcaattcgccttttccttcgtcaataaaggaaatattttctccattattcagtctgggtcgataactgttgacaccacctgcagcatgataaacaggttctcttgctgtctcggataaagaaacattaaacaattgaacggttcgtgtttttaatctattaggcagagaattgtgttcatgtttggcattgatttttcctgtgccattattatcgtcgttaaaagagtatttcccattttgacgtggttcgtagaatactgaatgggtatctccagcaaagatttcatcatagaaccaatctttacgaaccagctggaagccattgctttttcctatataggggttgcccgtttgcaataccccattaattaaccacttttgcttttgggcatcatagataaacattggtgagccactgtcgccaaatgagcctcctgttggtaaaaaaccatatgggctatgtttaattttttcactacctaagttgactgtgccaccacctgatccattttgtgcaaaggtattgccaccaacgagccaagaatacgcacttgcaatatgatatgaactttcgcggttattgggctcatcttcatcagatcgccaatattgcctgcctgccccaatacgaacacggtcagggtaattattttgatcgatatatttccgcccatccatataactggtcatttcaacaggttctgcatctgtgacaaatttatgcaaacgcggcatatgataatcgccgccataaggatggcctttagtccctgctttataattattccgtttcacaattttataagtaaaacgatgttgatcgggatttcttccttccgcaccaaaatcaacgttgttatagccgccgttatgtgccacgctcacaatatattgatcgcccaccaatgccgccacgccgttacgcgacaccacagaaaaatcaatcatcggggcttttgtcattgatttgccgaccaactccccttttttgttgtaaacctcaatatctttcgccccgactgcaaacttgcctttattttcggcaaagtcgcgatagtattggtagttgatgccgaaataagtgtgtcccgcccaggcttggggaagaatgccgaacgacaggcatatggctaagtaagcaggcgagaagcggatgcggccggttttcggggctttgcggtgtgtttcggttgtccgtttgtcggttgttttcattatttttccttatctgacgggattcgggtttgtttgggagggcgcggcttccgcttccgggcggcgcgcgggatgtgcctatatgtgcggttcggcgttcgggcggatatgaagcacgccctaggatttgtcattaatttttgccttggtctcggcttcttccaatcacgaaagcacccgccaaggcaaacactgtgccgccggcaagggaggcggcggttgcggggtagccgctccatacgaggaagacggcaaaaagcagtatcaggatggcgctgatgaagccgtacagttgcccgcgcctgttgaaggtttggtcttgccgtatggtttcgtgccggacggcttgttctttttccgccattgccataatgcggtctgccccgttgctgataatgtcgttgtattgcgccaagtcggacggcggcggcaacggtcccgaatggaaacaccgggctatcattatttgcacgtactcgtcggacaggatttgctcgacaagctccggggatttgacgacggtttcgacagcctgccgcgccttgtcctgtgcgttttcggtcattttcgcgctttctctatggcgcgttgaaaatcgccgccgatgtttttgagatcgtcggcgggattggggcggatggcggtttttgcgggatggaacagacccagcagcgagcctataccgagcaggagggcgtatgtgtttcgttttttcatatggttatatattaggtcaggcggacggatttatcaagcatttttgcggttttataccgtctgaaagccaaaccgtcggacttcagacggcatttgctataatcgcggctgttttgaattttcgggggttttatgtcggataacgttccaacgattgcggcagtcgctaccgcaccagggcgcggcggcgtgggcgtgatacgcatatcggggaaaaacctgctgccgatggcgcaggctttgtgcgggaaaacgcccaagccgcgtaccgcaacctatgctgattttacggacacggacggacaggcaatcgacagcgggcttttgctgttttttgccgcaccggcaagttttacgggtgaagatgtcatcgagcttcagggacacggcgggccggtggtgatggatatgctgctgaaccgctgtttggaattgggcgcgcgccttgccgaaccgggcgagtttacgaagcgtgcgtttttgaacgacaaactggacttggcacaggcggaaggcgtggcggatttgattgacgcatccagccgttcggcggcgcgtctggctttgcgctcgctcaagggcgatttttcgcggcggatacacggtctggtcgaagacttgattaccttgcggatgctggtcgaagcgacgttagattttcccgaggaagacattgattttctcgaagcggcagacgcacgcggcaaactggacggcttgcgccgcgccgtggatgatgtgcttgccaacgcgcagcagggcgcgattttgcgcgaaggtctgaatgtcgtattggtcggcgcgccgaatgtgggcaagtccagcctgctgaacgcgttggcgggcgacgaagtggcgattgttaccgatattgccggaacgacgcgcgacgcggtcagggaacgtatcctgattgacggcgtgccggtgcatattgtcgatacggcaggtttgcgcgagacggacgacgtggtcgagcgtatcggcatcgaacgcagccgcaaagccgtatccgaagccgatgtcgcgctggtgttggtcgatccgcgcgagggtttgaatgaaaagacacgggcgattttggacgcgttgccgccggagttgaaacgcatcgaaatccacagcaaatccgatttgcacgcacacgcggcaggcgggttcggtacgggcgcggaaaccgtcatcgcgttgtcggcgaaaaccggcgacggcttggacgcgctgaaacggacgttgttgcgcgaggccggttggcagggcgaaagcgaagggttgtttttggcgcggacgcggcacgtcaacgcactcaaagcagcgcaggaagaattgtcgctggcggcattgtgcggcaaccatcaaatcgagctgtttgccgaacacttgcgcttggcgcaggtcgcatgcggcgaaatcacgggcgagtttacggcggacgacctgctcggcgtgattttttcgaggttttgtatcggaaaataaacggatcgaaagcatcgtggtggtgtccggctgaacattccgttatcccataaaaacgggaatccgatccgtttggttttatagtggattaacaaaaatcaggacaaggcgacgaagccgcagacagtacaaatagtacggaaccgattcacttggtgcttgagcaccttagagaatcgttctctttgagctaaggcgaggcaacgccgtactggtttttgttaatccactatagtttttttgaatttcgggcaacgcttgaatcttcattccgcgcaggcggaaattatcggtgcggtacggcaacttttttcgatatgaaaagaccgtcattcctgtaaaaacaaaaaatcaaaaacagaaaattgaaattcgtcattcccgcgcaggcgggaatccaggacgtaaaatctatagtggattaacaaaaaccagtacagcgttgccttgacttagctcgaagagaacgattctctaaggtgctgaagcaccgagtgagtcggttccgtactatccgtactgtctgcggcttcgtcgccttgtcctgatttttgttaatccactataaagaaaccgtttttctcgataagtttccgtgccgacagacctggattcccactttcgtgggaatgacggtggaaaagttgccgtgatttcggataaattttcgtaacgcataatttccgttttacccgataaatgcccgcaatctcaaatcccgtcattccccaaaaacaaaaaatcaaaaacagaaatatcgtcattcccgcgcaggcgggaatctagaccttagaacaacagcaatattcaaagattatctgaaagtccgggattctagattcccactttcgtgggaatgacgaattttaggtttctgtttttggttttctgtccttgcgggaatgatgaaattttaagttttaggaatttatcggaaaaaacagaaaccgctccgccgtcattcccgcacaggcttcgtcattcccgcgcaggcttcgtcattcccgcatttgttaatccactatattcccgccgtttttttacatttccgacaaaacctgtcaacaaaaaacaacacttcgcaaataaaaacgataatcagctttgcaaaaatccccccccccctgttaatataaataaaaataattattaattatttttcttatcctgccaaatcttaacggtttggatttacttcccttcatactcaagaggacgattgaatgaataccccattgttccgtctcagcctgctctcgcttaccctggcggcaggttttgcccatgcggcagaaaataatgccaaggtcgtactggataccgttaccgtaaaaggcgaccgccaaggcagcaaaatccgtaccaacatcgttacgctgcaacaaaaagacgaaagcaccgcaaccgatatgcgcgaactcttaaaagaagagccctccatcgatttcggcggcggcaacggcacgtcccaattcctgacgctgcgcggcatgggtcaaaactctgtcgacatcaaggtggacaacgcctattccgacagccaaatcctttaccaccaaggcagatttattgtcgatcccgctttggttaaagtcgtttccgtacaaaaaggcgcgggttccgcctctgccggtatcggcgcgaccaacggcgcgatcatcaccaaaaccgtcgatgcccaagacctgctcaaaggcttggataaaaactggggcgtgcgcctcaacagcggctttgccagcaacgaaggcgtaagctacggcgcaagcgtattcgggaaagagggcaacttcgacggcttgttctcttacaaccgcaacaatgaaaaagattacgaagcaggtaaaggcttccgtaataatttcaacggcggcaaaaccgtaccgtacagcgcgctggacaaacgcagctacctcgccaaaatcggaacaagcttcggcgacggcgaccaccgcatcgtattgagccatatgaaagaccagcaccggggcatccgtaccgtccgtgaagaatttaccgtcggcggcgataaagagcgaataagtatggaacgccaagcccctgcttaccgcgaaaccacacaatccaacaccaatttggcgtacacgggtaaaaacctgggctttgtcgaaaaactggatgccaacgcctatgtgttggaaaaagaacgctattccgccgatgacagcggcaccggttacgcaggcaatgtaaaaggccccaaccatacccaaatcaccactcggggtatgaacttcaacttcgacagccgccttgccgaacaaaccctgctgaaatacggtatcaactaccgccatcaggaaatcaaaccgcaagcgtttttgaattcacaatttaaaattgaagataaagaaaaagcaactgatgaagagaaaaataagaaccgtgaaaatgaaaaaattgccaaagcctaccgtctgaccaacccgaccaaaaccgataccggcgcgtatatcgaagccattcacgagattgacggctttaccctgaccggcgggctgcgttacgaccgcttcaaggtgaaaacccacgacggcaaaaccgtttcaagcaacaaccttaacccgagtttcggcgtgatttggcagccgcacgaacactggagcttcagcgcgagccacaactacgccagccgcagcccgcgcctgtatgacgcgctgcaaacccacggcaaacgcggcatcatctcgattgccgacggcacgaaagccgaacgcgcgcgcaataccgaaatcggcttcaactacaacgacggcacgtttgccgcaaacggcagctacttctggcagaccatcaaagacgcgcttgccaatccgcaaaaccgccacgactctgtcgccgtccgtgaagccgtcaatgccggttacatcaaaaaccacggttacgaattgggcgcgtcctaccgcaccggcggcctgactgccaaagtcggcgtaagccacagcaaaccgcgcttttacgatacgcacaaagacaagctgttgagcgcgaatcctgaatttggcgcacaagtcggccgcacttggacggcttcccttgcctaccgcttccaaaacccgaatctggaaatcggctggcgcggccgttatgttcaaaaagccgtgggttcgatattggtggcaggtcaaaaagaccgcaacggcaaattggaaaacgttgtacgcaaaggtttcggtgtgaacgatgtcttcgccaactggaaaccgctgggcaaagacacgctcaatgttaatctttcggttaacaacgtgttcaacacgttctactatccgcacagccaacgatggaccaataccctgccgggcgtgggacgtgatgtacgcttgggcgtgaactacaagttctaaaacgcacatcccgaaaaaatgccgtctgaaagcctttcagacggcatctgttctgataatttgatatatagtggattaacaaaaaccagtacggcgttgcctcgccttagctcaaagagaacgattctctaaggtgctgaagcaccaagtgaatcggttccgtactatttgtactgtctgcggcttcgtcgccttgtcctgatttttgttaatccactataaagaccgtcgggcatctgcagccgtcattcccgcgcaggcgggaatctagaccttagaacaacagcaatattcaaagattatctgaaagtccgagattctagattcccgctttcgcgggaatgacgaaaggttgcgggaatgacgaaaagtggtgggaatgacgaaaagtgatgggaatgacgaaaagtgatgggaatgacggttcgggcattccttaaattacccgtgtatcgctgtaaatcttagagatggcggaatatagcggattaacaaaaaccagtacggcgttgcctcgccttagctcaaagagaacgattctctaaggtgctgaagcaccaagtgaatcagttccgtactatttgtactgtctgcggcttcgtcgccttgtcctgatttttgttaatccactatagattatcatttatcctttctaaagccgttccggtttgtccgaccggcggctttgccccaatatccccattttggagacacctatgttacgtttgactgctttagccgtatgcaccgccctcgctttgggcgcgtgttcgccgcaaaattccgactctgccccacaagccaaagaacaggcggtttccgccgcacaaaccgaaggcgcgtccgttaccgtcaaaaccgcgcgcggcgacgttcaaataccgcaaaaccccgaacgcatcgccgtttacgatttgggtatgctcgacaccttgagcaaactgggcgtgaaaaccggtttgtccgtcgataaaaaccgcctgccgtatttagaggaatatttcaaaacgacaaaacctgccggcactttgttcgagccggattacgaaacgctcaacgcttacaaaccgcagctcatcatcatcggcagccgcgccgccaaggcgtttgacaaattgaacgaaatcgcgccgaccatcgaaatgaccgccgataccgccaacctcaaagaaagtgccaaagagcgcatcgacgcgctggcgcaaatcttcggcaaacaggcggaagccgacaagctgaaggcggaaatcgacgcgtcttttgaagccgcgaaaactgccgcacaaggtaagggcaaaggtttggtgattttggtcaacggcggcaagatgtcggctttcggcccgtcttcacgcttgggcggctggctgcacaaagacatcggcgttcccgctgtcgatgaatcaattaaagaaggcagccacggtcagcctatcagctttgaatacctgaaagagaaaaatcccgactggctgtttgtccttgaccgaagcgcggccatcggcgaagagggtcaggcggcgaaagacgtgttggataatccgctggttgccgaaacaaccgcttggaaaaaaggacaggtcgtgtacctcgttcctgaaacttatttggcagccggtggcgcgcaagagctgctgaatgcaagcaaacaggttgccgacgcttttaacgcggcaaaataatgaaacggcggcattcgatgccgtctgaaacacggatgcaaaccgcctcctgtgtttcagacggcattgcccgatacggaggcttcaaacaaggctttccgctccgacggttcggactgccttgtttgaatcttctacgccttaacgcttttcccttctgtttatgactgccaaacctttttccctcaacctgaccaacctgctgctgctggcggtgttgtttgccgtcagcctgtcggtgggcgttgccgatttccgctggtctgatgtgttttcactgtccgacagccagcaggtcatgttcatcagccgcctgccgcgcacgtttgcgattgtgctgacgggcgcgtcgatggcggtggccggcatgattatgcagattttgatgcgcaaccgttttgtcgaaccgtcgatggtgggcgcaagccaaagcgcggctttaggtttgctgctgatgaccctgctgctgccggccgcgccgctgccggcgaaaatgtcggttgccgccgttgccgcgctgatcgggatgttggtctttatgctgctgatccgccgcctgccgccgaccgcgcaactgatggtgcctttggtcgggattattttcggcggtgtgattgaggcggtagccacctttatcgcgtatgaaaacgaaatgctgcaaatgctcggcgtgtggcagcagggcgatttttcgagcgtgctgctggggcggtacgagctgctttggattacgggcggtttggcggtgtttgcctatctgattgccgaccggctgacgattttggggctgggcgaaacggtaagcgtgaatttgggtttgaaccggacggcggtgttgtggtcgggtttgattattgtggctttgattacgtcgctggttatcgttacggtcggcaatattccgtttatcgggctggtcgtgccgaacatcatcagccgcctgatgggcgacaggttgcgccaaagcctgcctgcggtggccttgctgggcgcatctttggtgttgctgtgcgacattatcggacgcgtgattgtgtttccgtttgaaattccggtctctacggtttttggtgtattgggtacggctttgtttttgtggcttttgttgaggaaacccgcctatgccgtctgaaaaaaatatcggttttatggcaggaagcagccgcccgttgtgggtcgcctttgcgctgttgctggtttcctgcgtcctgtttatgacgctcaacgtcaaaggcgattgggattttgttttgcaactgcggctgaccaaacttgccgcgctgctgatggtcgcctatgcggtcggcgtgtccacgcaactcttccaaacgctgaccaataatccgattctgaccccttcaattttgggtttcgattcgctgtatgtgtttttgcagaccttgctggtgtttacgttcggcggcgtgggctatgcttccctgccgttgacgggcaaattcggctttgaactggtcgtcatgatgggcggctcgctgctgctgttctacacgctcatcaaacagggcggacgcgatttgtcgcgcatgattttaatcggcgtgattttcgggattttgttccgcagcctgtcgtcgctgctttcgcgcatgatcgatcccgaagaatttaccgccgcgcaggcgaatatgtttgccggattcaataccgtccacagcgagcttttgggcataggcgcgctgattctgctcgtcagcgcggcggtcgtttggcgcgaacgctaccgcttggacgtttaccttttggggcgtgaccaagccgtcaatttgggcatcagctacacgcgcaacaccttatggatactgctttggattgccgcattggtggcgacggcgaccgccgtggtcggccccgtaagctttttcgggcttctcgccgcctcgcttgccaaccacttttccccgtcggtcaaacattccgtccgcctgccgatgacggtttgtatcggcggcatcctcttggtcggcggacagaccgtgttcgaacacctgctcggtatgcaggcagtgttgagcgtagtagtagaatttgccggcggactcgttttcctctatctcgttttaaaacacaaaaaatgacggatgccgtctgaacggccgccgccccgaaaggacaaaccatatgacacaagaacatttcccatcattcttcaaccaagccccgaccattaccgtccaagacgcattggccgaattcctcggcgcggccgaaaacggcatcctcacttaccgctacgccgatgccgtgcgcctgtgcggacattcctgcccgaccgtcgcgggcgcgtacctgatggttatcaaaggtctgaaagcactttacggcgaagagctgcccgaacgcggcggcatcgaagcctttatgcagggcgcgcgcgacgaaggcacggtcggcgtaaccgcgtccgtcgtccaactcctcaccggcgcagcccccgaaaccggctttggcggcatcggaatgcagggacgctttgcccgccgccacctcttatcctttggtgtaggcgaaatcaacggcacactgaccctgcgccgcaaagacaacggcaaaaccgtcgccgtcggcctcaacgccgccctgcaacccttcgcacccgaaatgcgcgacatcatgcccaaagccgtcagcggcagcgcaagcgcagaagaactcgaacgcttcggacaactctggcaggcacgcgttaaagcatttttaaccgaatcggcggacgacccgcagttcgtcatcgtccgcgaagtgtgagcgttcagacggcattccgaatttcaaatgccgtctgaaccccgccaaacaacaacaaacctacgcccgacaagcatccgccatgattaccatccgcaacgtcagctaccgcatcggcacacgccccatcctcgacaacgtcagcctcgacatccccgaaggcggcattaccgccctcgtcggccccaacggtgcgggcaaatccaccctgttttcctttatggcgcggctgcgaccgcttgaaagcggcagcatcgcctaccgaggcaaaaatcttgccgatacccccaccgccgaactcgccaaaaccctgtccatcctcacccaagaaaacagcatcatgagccgcatcaccgtgcgcgacctgctgatgttcggccgttacccctaccatcaaggcagaccgactgccgaatgccgccgtatcgttaacggtgcaatcgaagaattccacctgcaagacctctccgaccgctacctgaccgagctttccggcggccaacgccaacgcgccatgattgcgatggtgttctgccaaagcaccgactacgtccttttggacgaaccgctgaacaacctcgatatgtatcacgcccgctcgctcatgcaaatcctgcgccggctgaccgacgaacacaagcgcaccaccgtcgtcgtattgcacgacatcaaccaggcagcagcctacgccgaccacgtcgtcgccatgaaaaacggccaagtcgccatgcagggcaaacccaacgatattttcaccgccgcaaacatcaaaaccctattcgatatggacgtcgacgtcctcgattacgaaggcaaaaaattggttatccaccatatctaaatccgacaaaaaggccgtctgaacattcagacggcaacccatatcctgacaaaattaagacacgacaccggcagaattgacatcagcataatatgcacatattaacagatattaatgccgaactacctaactgcaagaattaaataaataaataaataaataaataaataaataaattgcgacaatgtattgtatatatgcctcctttcatatatactttaatatgtaaacaaacttggtggggataaaatacttacaaaagatttccgccccattttttatccactcacaaaggtaatgagcatgaaacactttccatccaaagtactgaccacagccatccttgccactttctgtagcggcgcactggcagccacaagcgacgacgatgttaaaaaagctgccactgtggccattgttgctgcctacaacaatggccaagaaatcaacggtttcaaagctggagagaccatctacgacattggtgaagacggcacaattacccaaaaagacgcaactgcagccgatgttgaagccgacgactttaaaggtctgggtctgaaaaaagtcgtgactaacctgaccaaaaccgtcaatgaaaacaaacaaaacgtcgatgccaaagtaaaagctgcagaatctgaaatagaaaagttaacaaccaagttagcagacactgatgccgctttagcagatactgatgccgctctggatgaaaccaccaacgccttgaataaattgggagaaaatataacgacatttgctgaagagactaagacaaatatcgtaaaaattgatgaaaaattagaagccgtggctgataccgtcgacaagcatgccgaagcattcaacgatatcgccgattcattggatgaaaccaacactaaggcagacgaagccgtcaaaaccgccaatgaagccaaacagacggccgaagaaaccaaacaaaacgtcgatgccaaagtaaaagctgcagaaactgcagcaggcaaagccgaagctgccgctggcacagctaatactgcagccgacaaggccgaagctgtcgctgcaaaagttaccgacatcaaagctgatatcgctacgaacaaagctgatattgctaaaaactcagcacgcatcgacagcttggacaaaaacgtagctaatctgcgcaaagaaacccgccaaggccttgcagaacaagccgcgctctccggcctgttccaaccttacaacgtgggtcggttcaatgtaacggctgcagtcggcggctacaaatccgaatcggcagtcgccatcggtaccggcttccgctttaccgaaaactttgccgccaaagcaggcgtggcagtcggcacttcgtccggttcttccgcagcctaccatgtcggcgtcaattacgagtggtaagcagcatctcccgataaagaaaccgcagccctgcaaggctgcggtttttattttctatccggccgtcagactgccgcgtccgaacgttcgcccgtgcggatacggattgcctcctcaaccggcagcacaaaaatcttgccgtcgccgatttttcccgaacgcgccacctcgaaatcacgtcaatcgcgcgttccacagcatcatccgccaacaccagctcgattttgattttgggcaggaaatcgacggcgtattccgcgccgcgatagatttccgtatgccccttctgcctgccgaaccctttgacctcgctgacggtcatgcccgtaatgccgatttccgtcaacgcctcgcgcacgtcgtcgagtttgaacggtttgacaatcgcctcgatttttttcataaaatttcctttgaacaaacaatacaaacacatccgaaaaacgggaacctcccgtcagattgtcaacattttaagccaaaatacccaagcaatacagccccgttgcgcgtataatgacagattttccaaccgcatttgagagccgaatccatgtctgtcgttttgcccttgcgcggcgttaccgccctttccgatttccgtgttgaaaaactcttgcaaaaagccgccgcactcggtctgcccgaagtcaaattaagcagcgaattttggtatttcgtcggcagcgagaaagcacttgatgccgcgactgtcgaaaaactgcaagccttgttggcggcgcaaagcgttgaacaaacgccaaaagcgcgcgagggcttgcatttgtttttggtcacgccccgtttgggtacgatttcgccgtgggcttccaaggcgaccaatatcgcggaaaactgcggtttggcaggcatcgaacgcatcgagcgcggtatggcggtgtggctggaaggtcgtctgaacgatgaacagaaacagcaatgggcggctttgctgcacgaccgcatgaccgaaagcgtgctgcccgattttcagacggcctccaaattattccaccatctcgaatccgaaactttctccggcgtcgatgttttgggcggcggtaaagaagctttggtcaaagccaataccgaaatgggcttggcactttccgccgacgaaatcgattatctggtcgaaaactatcaggctttgcagcgcaatccgtccgatgttgaattgatgatgttcgcgcaggcaaacagcgaacactgccgccacaaaatcttcaacgccgatttcatcctcaacggcgaaaagcagcccaaatccctcttcggtatgatacgcgacacacacaacgcgcatcccgaaggcacggtcgttgcctataaagacaattcgtccgtaatcgaaggcgcgaaaatcgagcgtttctatccgaatgcggcggaaaaccaaggctaccgtttccacgaggaagacacgcatatcatcatgaaagtggaaacgcacaaccacccgaccgccatcgcgccgtttgcgggtgcggcgacgggcgcgggcggcgaaatccgcgacgaaggcgcgacgggcaaaggttcgcgtccgaaagcgggcctgaccggctttaccgtgtccaacctcaatattcccgacctcaaacagccgtgggaacaagactacggcaagccggaacatatttcctcgccgctggacatcatgattgaaggcccgatcggcggcgcggcgttcaacaacgaattcggccgccccaacctcttgggctacttccgcacttttgaagaaaaatttgacggtcaggttcgcggctatcacaaaccgattatgattgccggcggcttgggcagcattcaggcgcagcagacgcataaagacgaaatccccgaaggcgcattgctgatccaactgggcggcccgggtatgcttatcggcttgggcggcggcgcggcttcttcgatggataccggcacaaacgacgcgtctttggacttcaactccgtgcaacgcggcaaccccgaaatcgaacgccgcgcgcaggaagtcatcgaccgctgctggcagctcggcggcaaaaacccgattatctccatccacgacgtaggcgcgggcggcctgtccaacgccttccccgaactggtcaacgatgccagacgcggcgcagtattcaagctgcgcgaagtgccgcttgaagaacacggcctcaacccgctgcaaatctggtgcaacgaatcgcaagagcgttatgtgttgtcgattttggaaaaagatttggatgctttccgcgccatctgcgaacgcgaacgctgcccgtttgccgtagtcggcacggcgactgacgacggtcatttgaaagtacgcgacgatttgttcgccaacaatcccgtcgatttgccgttgaacgtcttgctcggcaaactgcccaaaaccacgcgcaccgacaaaacggttgcaccgtccaaaaaaccgtttcacgcgggcgatatcgacattaccgaagccgcctaccgcgttttgcgcctgcctgccgtagccgccaaaaacttcctgattaccatcggcgaccgcagcgtcggcggtttgacgcaccgcgaccaaatggtcggcaaatatcaaactccagtagccgactgcgccgttaccatgatgggcttcaacacctatcgcggtgaagcgatgtctatgggcgaaaaaccgaccgtcgccctgtttgatgcgcctgcttcgggcagaatgtgcgtcggcgaagccatcaccaacatcgcggcggtcaacatcggagacatcggcaacatcaaactctccgccaactggatggcggcgtgcggcaacgaaggcgaagacgaaaaactctaccgcactgtcgaagccgtttccaaagcctgtcaggcattggatttgagcatccccgtgggcaaagacagcctgtcgatgaaaaccgtttggcaggacggcgaggagaaaaaatccgtggtttcaccgttgagcctgattatctcagcgttcgcgcctgtgaaagacgtacgcaagactgttacgcctgagttgaaaaacgtcgaagacagcgtattgttgtttgtcgatttgggcttcggcaaagcgcgtatgggcggttcggcgtttggtcaggtgtacaacaatatgagcggcgacgcgcccgatttggacgatacaggtcgtctgaaagccttttacagtgtgattcagcagcttgttgccgaaaacaaactcttggcgtatcacgaccgcagcgacggcggcttgtttgccgttttggtagaaatggcgtttgcggggcggtgcggcttggatatagatttaaatttattgcttgcacaaacatttattaccaaccataccgctctgtctcaatcattgcggactgaagaggtaaaagcgttggctgaatggcaagaaaccattgcccgcacattatttaatgaagagttgggtgctgttatccaagttagaaaacaagatgttgccgatattatcaatttattctatcaacaacagctgcatcataatgtctttgaaatcggtacgttaactgatgagaacacgttaatcatccgcgacgggcaaacgcaccttatttctgacaacctaatcaaactgcaacaaacctggcaagaaaccagccatcaaatccaacgcctgcgcgacaaccctgcctgcgccgacagcgagttcgcactgattggcgacaacgaacgcagcgcattgtttgccgacgtgaagttcgacgtgaacgaagacatcgccgcgccgtttatcaacagcggcgcgaaacccaaaatcgccatcctgcgcgaacagggcgtaaacgggcaaatcgaaatggccgccgcctttacccgcgccggattcgatgcttacgacgtgcatatgtccgacctgatggcaggccgcatccacctcgccgacttcaaaatgctggcggcgtgcggcggcttcagctacggcgacgtactcggcgcgggcgaaggctgggcgaaatcgattctgttccaccctgctctgcgcgaccagtttgccgccttcttcgccgacccggacacgctgacattgggcgtgtgcaacggctgccaaatggtcagcaaccttgccgaaatcatccccggcacggcaggctggccgaagttcaaacgcaacctgagcgaacagtttgaagcacgcctgagcatggttcacgttccgaaatcagcgtcgctgattctgaacgaaatgcaaggctccagcctgcctgtcgtggtcagccacggcgaaggccgcgccgacttcgcgcttcacggcggcaatatttccgccgatttgggcattgcgctgcaatacatcgacggacaaaaccaagtgacccaaacttatccgctcaaccccaacggctcgcctcaaggcatcgccggcgttactaacgccgacggccgcatcaccatcatgatgccccaccccgaacgcgtgtaccgtgccgcgcaaatgagctggaaaccggaaggctggacggaactgtccggctggtaccgcctctttgccggcgcacgtaaagccttgggctaaccgccctactcaaaccaatgccgtctgaagaatatttcagacggcgttccggcataccatcctttaaacggtatccgtccaccgaggaacactcatgaaaatcacccccgtcaaagccctaaccgacaactacatctggatgatacagcacggcaaccatgccgtctgcgtcgacccttccgaaccctcgcccgtcttggaattcctcgtccgcaaccgcctcatgcttgcccaaacatgggtaactcacccccatcccgaccacgagggcggtgcggcggcactctggcgcggctacatggaatcgcccgtttacggcgaatccgacatcgaagcagcaacccacaccgtaaccgccggcacccaattcaccttcggcgacggacaggttaccgtttgggcaacacccggccacacagaccgccacaccagctaccttctcgaaacttcagacggcatacacgtcttttgcggcgacacccttttttccgccggctgcggacgcgtgtttaccggcacaatcgaacagctttacgacagcttccaacgcttcaaccgcctgcctgaaaacaccctgttctatccggcgcacgaatacaccgccgccaacctgcgtttcgccgcccatatcgagccggacaacgccgacattcagacggcactgaaagcggcggcgcatacgcctaccctgcccgttaccctcgcgcacgaacgccgcgtcaatccgtttttgcgcgtcgacctgccgcacgtcagagaccgcgccgaggcattgagcgggaaaacgttaaacagcagcctcgatacctttgtcgcgctgcgtgaacttaaaaaccaataccggacgaaataaaacaacgggaaaacgcagccattcctaggatttttattaaaatcttaaataaaatcatacaatcatcgccaatagacgaaaggacaccgttgccttataatcaaacaaaaacaaaatatataatatagtggattgaatttaaatcaggacaaggcgacgaagccgcagatagtacggcaaggcgaggcaacgctgtactggtttttgttaatccactatattgttaatccactatataaatccagcacaaaacgggatcggtgattcttgtccgcaagaatcgttgattttctctattacacggataatcatcatgcgcttcacacacaccaccccattttgttccgtattgtccaccctcggtctttttgccgtttcccctgcttactcatccattgtccgcaacgatgtcgattaccaatattttcgcgactttgccgaaaataaaggcgcgttcaccgtaggtgcaagcaatatttccatccaagacaagcaaggcaaaatattaggcagggttctcaacggcatccccatgcccgacttccgcgtcagcaaccgccaaaccgccatcgccaccctggttcacccccaatacgtcaacagtgtcaaacacaacgtcggctacggttccatacaattcggcaacgacacccaaaatccagaagaacaagcctatacctaccgcctcgtatcacgcaacccgcacccggactacgactaccaccttccccgcctcaacaaactggttaccgaaatctcacctaccgcactcagcagcgtacccttgcttggaaacggccagccaaaggccaatgcctacctcgataccgaccgcttcccctactttgtacgactcggctcaggcacgcaacaagtccgcaaagcagacggcacgcgtacacgaaccgccccggcataccaatacctgaccggcggcacgccgctgaaagtattggggttccaaaaccacggcttactcgtcggcggcagcctgaccgaccaaccccttaacacctacgcaatcgccggagacagcggttcccccctgtttgccttcgacaagcatgaaaaccgctgggtgcttgcgggcgtactcagcacctacgccggcttcgataatttcttcaacaaatacatcgtcacgcaacccgaattcatccgttccaccatccgccaatacgaaacccggctggatgtcgggctgaccaccaacgaactcatatggcgcgacaacggtaatggcaacagcaccctgcaagggctcaacgaacgcatcaccctgcccattgcaaacccttcgcttgccccacaaaacgacagcaggcacatgccgtctgaagatgccggcaaaacgctcatcctatccagcaggttcgacaacaaaacactgatgctggcagacaatatcaaccaaggcgcaggcgcattgcagttcgacagcaacttcaccgtcgtcggtaaaaaccacacatggcaaggtgcaggcgttatcgtagccgacggcaaacgcgtcttctggcaagtcagcaaccccaaaggcgaccggctctccaaactgggcgcaggcacgcttatcgccaacggacaaggcatcaaccagggcgacatcagcatcggggaaggcactgtcgtactcgcccaaaaagctgcttcagacggcagcaaacaagcattcaaccaagtcggcatcaccagcggcaggggcacggccgtcctcgccgacagccagcaaatcaaacccgaaaacctctatttcggcttcaggggcggacggctcgacctcaacggcaacaaccttgcctttacccatatccgccatgcggacggcggcgcgcaaatcgtcaatcacaaccctgaccaagccgcgacactgacgctgaccggcaaccccgtcctcagtcccgagcatgtcgagtgggtgcaatggggcaaccgtccgcaaggcaacgcggcggtttacgaatacatcaacccgcaccgcaaccgtcggaccgactacttcatactcaaacccggcggcaacccgcgcgaatttttcccgttaaatatgaaaaactcaacaagctggcaatttatcggcaacaacaggcaacaggccgccgaacaagtcgcccaagccgaaaatgcccgccccgacctgattaccttcggcggatacttgggtgaaaacgcgcaaacgggcaaagccgcgccgagttacagcaaaaccaatgaagcagccatagaaaaaacccgccatatcgcaaatgccgccgtatacggccggcccgaataccgttacaacggcgcactcaacctgcactatcgtcccaaacgcaccgacagcacgctgttgctcaacggcggcatgaaccttaacggggaagtcttgattgagggcggcaatatgattgtgtcaggcaggcccgtaccccatgcctacgaccaccaggccaaacgcgaacccgttcttgaaaacgaatggaccgacggcagcttcaaggctgcacggttcaccctgcgaaaccatgcccgactgacggcagggcgcaataccgcgcatctggacggcgacataaccgcatacgatctgtccggcatcgacctcggctttacccaaggcaaaacaccggaatgctaccgctcctaccatagcggcagcacccactgcacacccaacgccgttttaaaagccgaaaactatcgtgcactacctgcaacgcaagtacgcggcgacattacccttaacgaccgttcagagctccgcctgggcaaagcacacctgtacggcagcatccgtgccggcaaagacaccgcagtccgcatggaagcagacagcaactggacactttcccagtccagccacaccggcgcactgacgcttgacggcgcacaaattaccctgaaccccgatttcgccaataatacacacaacaaccgcttcaacacactgaccgtcaacggcacacttgacgggttcggcacattccgattcctgaccggcatcgtccgaaaacaaaatgccccccccctcaaactggaaggggacagccgcggcgcattccaaatccacgtcaaaaacaccggacaagaacctcaaacaaccgaatcgcttgcacttgtgagcctcaatccgaaacacagccaccaagcccgattcaccctccaaaacggctatgccgatttgggtgcctaccgctacatcctccgcaaaaacaacaacggatacagcctgtacaacccgctcaaagaggccgaacttcaaattgaagccacgcgtgcggaacatgagcgcaaccaacaggcatacaaccaattacaggcaaccgacatcagcagacaggttcaacatgactctgacgcgaccaggcaggcactacaggcctggcagaacagtcaaaccgaacttgcccgcatcgacagccaagtccaatatctgtccgcccaattgaaacagacagacccgctgaccggcattctgacgcgtgcccaaaacctgtgtgccgcacaaggatacagtgccgatatctgccgtcaggttgccaaagccgccgacacgaacgacctgacactcttcgaaaccgaactggatacgtatatagaacgtgtagaaatggccgaatccgaacttgacaaagcacggcaaggcggcgatgcgcaagccgtcgaaacagcccggcacgcctacctgaacgcactcaaccgtctgtcccgacaaatccacagtttgaaaaccggcgttgccggcatccgtatgccgaacctggccgaactgatcagccggtcggccaacaccgccgtttccgaacaggccgcctacaataccggccggcaacaggcgggacgccgcatcgaccgccaccttaccgatccgcagcagcaaaacatctggctggaaaccggtacgcaacaaaccgactaccatagcggcacacaccgtccctaccaacaaactaccaactatgcacatatcggcatccaaaccggcatcaccgaccgtctcagtgtcggtacgattttaaccgatgagcgcacaaacaaccgttttgatgaaggcgtatccgcccgaaaccgcagcaacggcgcacatctgttcgtcaaaggggaaaacggcgcactctttgccgcggcagatttaggctacagcaacagccgtacccgatttaccgattatgacggggctgccgtccgccgccacgcatgggatgcaggcatcaacaccggcatcaaaatcgataccggcatcaacctcagaccctatgccggcatccgtataaaccgcagcaacggcaaccggtacgtactcgacggcgcagagataaacagcccggcgcaaatccaaaccacatggcatgccggcatccgtctcgataaaaccgtcgaactgggtcaagccaagctgacccccgccttcagcagcgattactaccatacccgccaaaacagcggttccgccctcagcgtcaacgaccgtaccttactgcagcaagccgcccacggcacactgcataccctgcaaatcgacgccggatacaaaggctggaacgccaaacttcatgccgcttacggcaaagacagcaacaccgcccgccacaaacaggcaggaatcaaaataggctacaactggtaacaagccgataaaaatgccgtctggaacccgcgtttcagacggcatttgcgttaaaaatagtaaaccgttccaaaagggagtagaatagtgccgtttccaaccctgcgcctgtaccgtcaggcttttattatggaccttcccagttcgtttttactgaacaccccatccgattcaaacccgcaataaccatcccgccggaatgcctccccgcacacggcgggcggagcatttatgagcatcgaaccaacccctccgaaccttgaaaacgacggtatcgaaaacgatgtagaacgcgtttccgccgatttcgaccgtgtccactccctctgcgaaatcctcgaacctgcttttgaacaaatcgaaaacggtacaccgctcgaagacgcgccgctgcgcgacaagctgaccgagctgaccgtcctcttgagcgagctgcaccctgccgacgtggcggcggtattggaatcgctaccgccgcgcgaacgcaatatcgtctggattctggtcaaaccggaagacgacggcgaagtattgctggaagtatccgacgcggtgcgcgaaacgctgatcgagtcgatggacaaagacgaattgttggcagcggtcgatgatttggacgcggacgaattggcggaactggcagacgatttgccgcaccaagtggtttacgaagcgctacaaacccgcgatgaggaagaacgcgcccaagtcaaagcggcaatgtcctacgaagacaaccaagtcggtgcgattatggacttcgagttggtcagcatccgcgccgatgtcgcctgtgaagtggtgctgcgctatctgcgccgcttcgacagcctgcccgaccataccgacaagatttttgtggtcgatgaaaacgacgtactgcagggcgtgctgcccatccgcaaacttttggtcgccgatcccgaagacttggtggaaaacgtgatggcgaaagatgtcgtgcgtttccgcgccgaagatgacgtggaagaagcggcgcaggcgtttgaacgctacgacttggttaccgcgcccgtcgtcgatgaaaacaaaaagctcatcggcaggattaccatcgacgagatggtggacgtgatccgcgaagaatcggaagcggatatgctgaatatggcgggtttgcaggaagaggaagacctgttcgcccccgtgtgggattcggtgaaaaaccgctggatgtggctcgccgtcaacctctgcaccgccttcctcgccagccgtgttatcggcgcgtttgaaggcagcatcgaaaaaatcgtcgcactcgccgcgctgatgcccatcgtcgccggcataggcggtaactcgggcaaccagacgattaccatgattgtccgcgcgatggcgatggggcagctgacggatatgcaggcggggcgtttgctgaaaaaagaagtcggtgtcgccttggtcaacggcatcatttggggaacggtcatgggcgcagtatcttggctgctttacggcagcctcggcatcgggctggttatgattgccgcgatgacgctcaacctcctgctggcggcaaccgtcggcgtattaattcccgtggtaatggaaaagttcggacgcgatcccgcactgggcagctcggtgctgattaccgccgttaccgactccggcggcttcctgattttcttggggctcgccaccctattcctgctttaaatgccgtctgaacccgcgcaaaaatgccgtctgaagcggaagctgcttcagacggcatttgactatttatccttgttgcacaagattattggacggtatgccggggcagccctttggcaacgccgaccacatcctccccgaacagcgcgttgacatcggtttcgtcaaacacatatttgctgtggcagaaatcgcaatcgacttcgatgctgccttgttccaccaccacgccgccgacttcttccccgcccagcatcaacagcatatcgctgactttgccgcgcgaacaggtgcatgaaaattcaaacgtttccggctcgaacacgcgcggcggcgtttcgtggaacaggcggtataaaacgtgttgcgcgtccagtcctgccagctcctccgccgtcagcgtgcgcgccagcgtactgacgtgttcccatgcctcttcatccaatacctcttcaggcagacgctgcaccagcagaccgcccgccgcttcgtcgcttgcagacaggacgatgtgcgtatcaagctgttcggaacgtttcatatagttcaccaacatttgcgcgataccgccgccttccaaaggcactacgccctgccagggttcgccgtctttgggctgcagcgtcagcacgaatacgccgccctcgcccaaaaggtcgccgaggctttcgtcatcggctatttctgcggtttcgtcccaacgcgcggttgcacggacggtacggtcggaagccgcttccgcaaccagcattttcagccgcccccgcccctgaacctgcacaatcagcgtgccttcgtttttgaggttgcccgacagcaacacacccgccgccaacaactcacccaaagcgcggcggatggcggcgggatagtttttctgttttacaatgtgctgccacacgttttccagacggacgtgcagcccgcgcacgggcatatcgtcgaagataaagcgggtacgcacatcggcgcggttgatggcggtttgattcatgattttctctgactgattgttcggatggcggctatatggttgcggtcggcgcgaaaacaagacggacggcggatgcgcttcccaaattatcaataaattatataaaaatcaacatattaactcaatctaacaagccgttttttgccaaacagccgtttttttatatacaatcaacaagatattttcgactgatacagcataacatcgcacggcggcacgatgcctcctgcgcggaaacaccgatatggattcttttttcaaaccggcagtttgggcggttttgtggctgatgtttgccgtccgccccgcccttgccgacgagttgaccaacctgctcagcagccgcgagcagattctcagacagtttgccgaagacgaacagcccgttttacccatcaaccgagcccccgcccggcgggcgggcaatgccgacgaactcatcggcagcgcgatggggcttaacgaacagcccgttttacccgtcaaccgagtccccgcccggcgggcgggcaatgccgacgaactcatcggcaacgcgatggggcttaacgaacagcccgttttacccgtcaaccgagcccccgcccggcgggcgggcaatgccgacgaactcatcggcaacgcgatgggacttttgggtattgcctaccgctacggcggcacatcggtttctaccggttttgactgcagcggcttcatgcagcacatcttcaaacgcgccatgggcatcaacctgccgcgcacgtcggcagaacaggcacggatgggtacgccggttgcccgaagcgaattgcagcccggagatatggtgtttttccgcacgctcggcggcagccgcatttcccatgtcggactttatatcggcaacaaccgcttcatccacgcgccgcgcacggggaaaaatatcgaaatcaccagcctgagccacaaatattggagcggcaaatacgcgttcgcccgccgggtcaagaaaaacgacccgtcccgctttctgaactgatttcccaaggaatacgcaatgagtatgcccgaaatgcccaaatggtacgacgatgacggacagatcgtgtcctgtaccgaaaaggtcaaagtgatgtccgaaaatatggccgagctgtatcagacggcacaagacgcgtttgaagacgcgctgctgatgggttgcggcgaacgtcagttgcgcgattacctgctcgcgctgattgaaggtttggaaaatccctaccgcaaagtctgaacacgccccggttgctgcggcacggtttatccgtgccgtttttgcgtttgtgcgcggcttcggcttttcagacggcatatttgacgttatgattaaacagttaacaagatttatcacaacgccgtcaaaagacagacacacaacatgaacatcatccgcgcgctcctcatcatcctcggctgcctcgccaccggcgaaaccgccgttttcctagcaggcatcaaactgcccggcagcatcgtcggcatgggcgtgctgtttgcgcttttgcaggcgggttgggtcaaaacgtcttggctgcaacagcttaccgacgcgctgatgtcgaacctgacgctgttcctcgtgccgccctgcgtggcggtcatcagctatttggatttgattgccgacgattggttttcgatactggtttccgcctccgccagcactttgtgcgtactgctggttacgggcaaagtccaccggtggatacggggtattatccgatgaacgaaatcctcaggcagcccagcgttctgcttttcctcacgcttgccgtgtacgcgcttgcgattatcgtgcgcacgcgcacgggcaatatcttctgcaaccccgtactcgtcagcactatcgtgctgattgcctacctgaaaatcctcggtatcgattatgcggtgtaccacaacgccgcgcaattcattgatttttggctgaaacccgccgtcgtcgtgcttgccgtgccgctctaccaaaaccgccgtaaaatcttcaaccagtggctgcccgtcatcgtttcacagcttgcgggcagcgttacgggcattgttacagggatgtattttgccaaatggctgggcgcggaacgcgaagtcgtcctctcgctcgcgtccaaatctgttaccaaccccatcgctattgaaatcacccgctccatcggcggcattcccgccattaccgccgccaccgtcatcattgccggtctggtcggacagattgccggttacaaaatgctgaagaacacggtcgtcatgccctcgtccgtgggtatgtcgctcggcacggcttcgcacgcgatggggattgccgcctcgctcgaacgcagccgccgtatggcggcatacgcggggctggggctgacgttcaacggcgtactgaccgcgctgattgcgccgctgctcatccccgttttgggattttgaacccgtttcagacggcatttcagcccatgctgtctgaacgccgacacactcgcaaggagaaccgttatggctgtcaacctgaccgaaaaaaccgccgaacaactgcccgacatcgacggcattgccctctacaccgcccaagcaggcgtgaagaagcccgggcataccgacctgacactgattgccgtagccgccggcagcaccgtcggtgcagtcttcacgaccaaccgtttctgtgccgcgcccgtccacatcgccaaatcgcaccttttcgacgaagacggcgtgcgcgccctcgtcatcaacacgggcaacgccaacgcgggtacgggcgcacagggcagaatcgatgctttggcagtgtgtgccgccgccgcccggcaaatcggctgcaaaccgaaccaggtgctgcccttctccaccggcgtgattctcgaaccgctgcccgcagacaaaatcatcgccgccctgcccaaaatgcagcctgccttctggaacgaagcggcacgcgccatcatgaccaccgacaccgtgcccaaagccgcctcgcgcgaaggcaaggtcggcgacaaacacaccgtccgcgccacgggcatcgccaaaggctcgggcatgattcatcccaatatggcgaccatgctcggtttcatcgccaccgatgccaaagtttcccaacccgtcctccaactgatgacgcaggaaatcgccgacgaaaccttcaacaccatcaccgttgacggcgacaccagcaccaacgacagcttcgtcatcatcgccaccggcaaaaacagccaaagcgaaatcgacaacatcgccgacccgcgttacgcccaactcaaagaattgttgtgcagcctcgcgctcgaactcgcccaagccatcgtccgcgacggcgaaggtgcgaccaagttcatcaccgtccgcgtcgaaaacgccaaaacccgcgacgaagcccgccaagccgcctacgccgtggcacgttcgccgctggtcaaaaccgcctttttcgcctccgaccccaacctcggcaggctgctcgccgccatcggttatgccggcgttgccgacctcgataccgacctcgtggaaatgtatctcgacgatattttggttgccgaacacggcggacgcgccgcaagctacaccgaagcacaagggcaggcggtgatgtcgaaggccgaaatcaccgtccgcatcaagctgcatcgcggacaagccgccgccaccgtctatacctgcgacctgtcgcacggatacgtttccatcaacgccgattaccgttcctgacccgacacggcttcagacggcatacataaaatgccgtctgaaccgccggacaacataccatgacctccacattcccccgccgcctcgcccgcaaaatccgccaaacccgccgcctgtcgcgcaaaagcatcgcctttctgttccttttggcaggttcggcactcgtcgccctgaccgcgctgttttttgcccatcttgccgattttgcgctggaactgaacgccaaactggttcaacaatacccgtggttcgcgtgggtcgcgcttcctttgggtttaccgcttattgcgtggctcacacgcaaattcgcccccttcaccgccggcagcggcatcccgcaggtcatcgcctcactgtcgctgccctacggcgcacagaaaacgcggctgatccgcctcgggcagacgctgctgaagattccgctaacctttttgggtatgctgttcggcgcgtccatcggacgcgaaggtccgtccgtgcaggtcggcgcggcagtgatgggcgcgtggggcgcgtggtgcaagaaacacggcttggcattcaaagggatgcaggaaaacgatttgatggcggcgggcgcggcgggcggtttggcagccgcgttcaacgcgccgctggcgggcgtgattttcgccattgaggaactcgggcgcggcatcatgttgcgctgggagaggcaaattcttttgggcgtgctcgcctccggtttcatacaggtcgccattcagggcaacaacccgtatttttccggcttcaacggcggcgtattggaacatatctttctgtgggtcgcactgtccggcctggtttgcggcgcggcgggcgggctgttcggacgtttgctctatcgcggtgcggcggcgtttgcaccgcgcaagatacgcggcttcatccgcaaccgtccgctgctgctggcggcactgatggggctgctgctcgccctgctcggcacgttctaccaaggcaaaacctacggcaccggctaccacgaagccgcccaagccctgcacggcatctacgaagcccccttcggactcgccgccgccaaatggctcgccaccgtattcagctattgggcaggcgttccgggcggcattttcactccctcgctgaccataggcgcggttttgggcgagcatatcgccgccatcgccgacatatcgcagggtgcaaacatcatcgtcctcatctgcatggcggcatttctggcgggcgcgacacaatccccgattacttccgccgtcgtcgtcatggaaatgacgggcggacaaagcctgctgttttggatgctaattgcctgcattttcgcctcgcaggtttcgcgccagttttcgccgcgtccgttctaccacgcatcgggaatgcgcttccgccagcgcgtgcttcaagaaaccgccgcccaaaccggcaatgcgcccgcaagaccgcaaacagcaaacagcaaaacgggaatgccgtctgaaaattaaaacgcccccgatcaaacgccggcagccgccttgatttgaataccgttccgccgccgcttgaaatttcagcaacaatgccgtctgaacgacagaatgcggttttcagacggcatttccccatcccgatattgcctaaacaaaaccgaagcgtttgctataattctattttttaccgcatacgcaccaatcatgtttcccgatttctcccaaaccctctccaaagaccgccacttcctgcgttccgccttcaaaaatcccaacaaatacggcggtttgtccaaaatcgaagaaaaataccgaaaatcgcacgaaatctttttgaagcgtttggcagccttgccaaaacccgaattcgacaacaccctgcccgttcacgagaagctcgaagaaatcaaaaaagccattgccaagaatcaggtaacgattatttgcggcgaaaccggttcgggcaaaaccacgcagttgcccaagatttgcttggaactcgggcgtggggcggcaggattgatcgggcatacccagccgcgccgtttggccgcgcgctccgtagcagagcggattgccgaagagctgaaatccgaaatcggcagcgcggtcggctataaagtacgcttcaccgaccacacctcgcgcgatgcctgcgtcaagctgatgaccgacggcatcctgctggcggaaacgcagaccgaccgttatctcgccgcctacgacacgattatcatcgacgaagcgcacgagcgcagcctgaacatcgacttccttttgggctatttgaaacaactcctgccgcgccgccccgatttgaaagtcatcatcacctcggcaacgatagacgcagaacgcttctcccgacacttcaacggcgcgcccgttttagaagtgagcggacggacgtatcccgtcgaaatcctctaccgaccgctgaccggcaaagacgaagacgacgcagaagtggagttgaccgacgcgattgtcgatgcggcggacgaattagcgcgacacggcgaaggcgatattttggtattcctgccgggcgagcgcgaaatccgcgaaactgccgaagccctgcgcaaatccacgctgcgccgcaacgacgaaatcctgcccctgttcgcacgcctgtcgcacgccgagcagcacaaaatcttccacccctcaggcgcgaaacgccgcatcgtattggcaaccaacgtcgccgaaacctcgcttaccgtgccgggcatcaaatacgtcatcgacaccggcctcgcgcgtgttaaacgctattccgcacgggcgaaagtggagcagcttcatatcgaaaaaatctcccaagccgccgcccgccaacgatccggccgctgcggacgcgtctccgcaggcgtgtgtatccgactgttttcagaagaagattttaacagccgccccgaatttaccgaccccgaaatcgtccgcagcaacctcgccgccgtcatcctgcgcatggcagcattgaaactcggcgatgtggcggcattcccgtttttagaaatgcccgattcacggtatatcaatgacggttttcaggtgttgttggagttgggggcggtggaggccgtctgaaaacaggcagacataaaagaaaatccgcgtagagtgatgtaaacttacccttgctttaataagtagaaaatggtgggtttacgtccccccctgcggctactaaaaaaatataagagtaaacaacctttttgaaagaaaaatgtatggacgaaattcaaatacccaaaaaagtggaattacaaaccaaactagaaaatgaaaagattgttttatcgaaaggttctaccacgattattgttggtgctaatggcacagggaaaacaagattagctgtttatattgaagaacaattaaaggaaaaagcacacagaatttcggctcatagagcattaaaattaaaccctaatgtcaataaaataccagaaaagagtgccaaaacatatctatcttatggtcagaactgggatggaatcgatgtatcaaatagaaaaaattatagatgggataataactcatatactcatttactcaacgattttgattggttattacaatatttattcgctcaacaaaataatattgcggtagcaaataatcaaaagctcaaccgtaatgaaaaagtaaccaattcaaaaacaaagctagatattttgcaagaagcatgggaaacattattaccacacagaaaattacatattacagcagatgatattcaagtctctgctgtagataatgaggaattgtattctgcctcaaatatgagtgatggagagcgagcacttttctatattcttggacaagttttgtcagtagatgacggttctgtcttaatttttgatgagcctgaattacatattcataaatcaattatttcaaatctatgggataaaattgaagaattacgacctgattgttcatttctaatcattacacacgatattgaatttgctgcaactcgagtagctaaaaaatatgttatcagaaattattatccgacccctgcttgggatatttctgaagttcctgaaagtaattttgatgaagaaacaataacgatgattttaggtagccgtaagccaatattatttgttgagggcaacaataatagtttagatattgctacttaccgctattgttatcctgattggaccatcatacccaaaggggcatgcaaagatgtcattcaatcagtatcatcgctgaaaaaattaagtaatgaaatgccattactaaacttaaaatgttcaggtattgtcgatttagatagtagggatgaaagagaaattgaacaattaaataatttgggtatttacattttacctgtatccgaaattgaaaatctttttagcttaactgatgtagcaaaagagatattgaaactaaatcaatattcagatgaagaattactcaataaacttaatggatttaaatccgaactaattaaatatatagataatgaattaaaagacgataaattagacgaatttgttgtaaaacaggttcgacgtaaaattgataattatttaaaaaatattgatttatcctccaaaataacaagtactgatatgaaaaaatcattacttaatgaaatttctactttaacagaacagaaaattgaaacatggatttcagaaattaaaaatgaaattcaaagatgtattgaacagcaagatttggataaattacttactatatatgataataaaggactcttggctaaatcagcttgtgttttaaaaggaatgcgtaacaaacatgaatttgaaagctggataatgagaacattaaaaggaaggaataaagattttattgatgcaatcagacagaaacttccaattctggattaaataaaaccatctgaaaatttaccttcagatacagatatatttcatgaaaaatcatcaaactacactctctttccctacttcgagtagcctgaaaccttgcgcagacaaacaaggcctgtctgaagaccgcagccaataccgcctgaccaaactcggcgaacaaatggcgcacctgcctatcgacccgaaaattgcgcgtattttgttagtattattccgtttttaaaaatgcccgattcgcggtatatcaatgacggttttcaggtattgctggaattgggggcggtggaggccgtctgaaaataaaatctttctttataaaaaggcaggccatgtttcattttcagacggcctaaatcattgagaaactaaaaactattaaaaagggaatattgggttttaaaactcaatcggtaaatttttattgtgaaatattaatgatgaaaaaatctttccttacgcttgttctgtattcgtctttacttaccgccagcgaaattgcctatcgctttgtatttgggattgaaaccttaccggcggcaaaaattgcggaaacgtttgcgctgacatttgtgattgctgcgctgtatctgtttgcgcgttataaggtgacgcgtttgttgattgcggtgttttttgcgttcagcattattgccaacaatgtgcattacgcggtttatcaaagctggatgacgggcatcaattattggctgatgctgaaagaggttaccgaagtcggcagcgcgggtgcgtcgatgttggataagttgtggctgcctgtgttgtggggcgtgttggaagtcatgttgttttgcagccttgccaagttccgccgtaagacgcatttttctgccgatatactgtttgccttcctaatgctgatgattttcgtgcgttcgttcgacacgaaacaagagcacggtatttcgcccaaaccgacatacagccgcatcaaagccaattatttcagcttcggttattttgtcggacgcgtgttgccgtatcagttgtttgatttaagcaggattcccgcctttaagcagcctgctccaagcaaaatcgggcagggcagtgttcaaaatatcgtcctgattatgggcgaaagcgaaagcgcggcgcatttgaagctgtttggctacggacgcgaaacttcgccgtttttaacccggctgtcgcaagccgattttaagccgattgtgaaacaaagttattccgcaggctttatgactgcagtgtccctgcccagttttttcaatgcgataccgcacgccaacggcttggaacaaatcagcggcggcgataccaatatgttccgcctcgccaaagagcagggctatgaaacgtatttttacagcgcgcaggcggaaaacgagatggcgattttgaacttaatcggtaagaaatggatagaccatctgattcagccgacgcaacttggctacggcaacggcgacaatatgcccgatgagaagctgctgccgttgttcgacaaaatcaatttgcagcagggcaagcattttatcgtgttgcaccaacgcggttcgcacgccccatacggcgcattgttgcagcctcaagataaagtattcggcgaagccgatattgtggataagtacgacaacaccatccacaaaaccgaccaaatgattcaaaccgtattcgagcagctgcaaaagcagcctgacggcaactggctgtttgcctatacctccgatcatggccagtatgttcgccaagatatctacaatcaaggcacggtgcagcccgacagctatctcgtgccgctagtgttgtacagcccggataaggccgtgcaacaggctgccaaccaggcttttgcgccttgcgagattgccttccatcagcagctttcaacgttcctgattcacacgttgggctacgatatgccggtttcaggttgtcgcgaaggctcggtaacgggcaacctgattacgggtgatgcaggcagcttgaacattcgcgacggcaaggcggaatatgtttatccgcaatgagtggcgtaaaaaccaataaagacaaatttagatgatgtcggggaagatgcccgaccgacaagactatgcaaaatatgaaaaaccaagtacgcggatcaggcatggatgcccgatccaatccggccaatgtttcagacggcctgcaaaacagttcgggtcatatcggtaccaacacgcgttaccgcctgaccaaactcggcgaacagatagcgcgcctacccatcgacccgaaaatcgcgcgcattttgctggcggcgaagaaacacgactgcatggcggaaatattggtgattgcgtccgcgctgtcgattcaagacccgcgcgagcggccgctagaagcgcgcgatgcctcagccaaggcgcacgagcgttttaccgacaagcagtccgatttccttgcctatctgaacatttgggacagcttccagcgcgaacgcgataaaggcttgtccaacaagcagctggtgcagtggtgccgccaatatttcctgtcgcacctgcggatgcgcgagtggcgcgagctgcaccaccagcttgcccaaaccgcgattgaaatgggtttaaccaccaaggaagccgctttcagacgacctcccgaagtcaggcagctcacgtcgtctgaaaatgcgggtgaccaagacctatctgctaaactcaaacaaaaacaactggataaaaagcaacaccgcgcccaaatccgcgccgccaaagaagcgggctacgaacaaatccaccgcgccctgctcactggccttatcgccaacgtcggcatgaaatcgcccgacggtaacgactacaccggcgcgcgcggcagccgcttccaccttttccccgcctccgccctgttcaaagccaaacccaaatgggtgatggcggcagaattggttgaaaccacgcgcctttacgcgcgcgacgtcgccgttatccagcccgaatggatagagcaggaagcgccgcacctcgtccgctatcattatttcgagccgcattgggaacaaaaacgcggcgaagtcgtcgccagcgaacgcgtgacgctttacggtctgaccgtattgccgcgccgccccgtgtcttacggcaaagttgcccccgaagaagcgcgcgaaatctttatccgcagcgcgttggtggcgcaggaatgcgatttgaaagcggatttttttgtccacaacaaaaagctgattaaagaaattaccgaactcgaacacaaatcgcgcaagcaagacgtgctggtcgatgacgaagccctgtttgcgttttataacgaacgactgcccgaaatggcttggaaagacgcgcaaggcagcgtttggggaagtgaagattccgtacggattattgaatctgacaaagccgagaggtcgtctgaaaatgagcgcaacgagtttcgtaaaaacaagcgtaatgggtctcgccaaaatgaaaatcacggcaacaccgtaggttgggttgaaaacccaacatcagccgcaactgcaaaaactgttgggtttgacaatccaacctacgctgcccaacaaaccaccccctcccccgtgggggagggtcggggagagggcaaaacagttgccgcacaaaccaacttttccgcaaccgcagcaaaccctctccctaaccctctcccgcaggagagggaacagagtgccgcagcttcaacgatttcagacgacctgcgtcctgcaaatctgcagcaaaccgccccctcccccgtgggggagggctggggagagggcaaaacagttgccacacaaaccaacttttccgcaacctcaacaaaccctctcccgcaggagagggaacagagtgcctcagcttcaacgttttcagacgacctgcgtcctgcaaatctgcagcaaccctctccctcccccgtgggggagggctggggagagggcaaaacagttgccacacaaaccaacttttccgcaacctcaacactttcagacgactccaaacccaaaaagcagcctgcaccccaaaaaaaccgtctgaaacccctacccctcgccgacatccgcaccttccaagcctggctcaaaaccgccgagcgcgacaatccgcgcctgctgttcctcagccgcgacgatctgatgcaacacgccgccgcacacattaccgaagaacagttccccaaattctggcaaaccgcagacggcaaattcaaactttcctaccgcttcgagccgcaccatccgctagacggcgtgaccatgaccgtgccgctgaccgtcctcaaccgcctgcacgcgccgtcgctcgaatggctggtgcccggcatgatacgcgaaaaaatccagttgcaaatcaaagcactgcccaagcaaatccgccgcatctgcgtgcccgtgcccgaattcatcacccaatttttaagccaaaaccccgaccgcaacgcccccatcctgccccaactcgcccaagccatcgccaaaaccgcaggcgacatccgcatattcgagcaaatcaaccaagacgaatgggccgcgttcaggctgcccgaacactgctatttcaacctccgcattatcgacgacggcggacaagagcttgccggcggccgcaaactgcacgaattgcaacaacaactcggtcaagctgccgccgttaccttccgtgacaacacccaagaatttgagcgcgacaacgtcaccgcatgggacatcggcaccctgcccgaatccatcaaattcgcacgcggcaaacaacagctcaccggctatctcggcctacaaaaagaaaaagacggccgcatcgccctgcgcctgtttgataccacagaagccgcagagcaggcacaccgtcaaggtgtcatcgaattgatgaagctgcaattaaaagagcaggtaaaggatttgaacaaaggcatccaaggcttcacccaagctgccatgctgctcaaacacatcaacgccgacactctgcgcgacgacctcacccaagccgtctgcgaccgcgcctttatcggcgaagacgagctgccgcgcaacgaaaaagccttcaaagaacaaatcaaacgcgcccgcagccgcctgcccgccgtcaaagaagccctcagccgctacctgcaggaaaccgccgccgtctacgccgaactcaacagcaaactcggcaaacacccattgacccaccttctaagactacgcctgcaaaccctgctcgccgccggcttcgccacccgaaccccgtgggcacaatggccgcgcctccccatctacctcaaagccatgaccctgcgcctcgaaaaatacagcagcaaccccgcccgcgacgcagcccgcgaagccgatatccaagagctggaacaaatgtggcaggaaaaaacagacagcctgattaaacaaggtctccccatttcagacggcctcgccgcgtttaaatggatgattgaagaattgagggtgtcgctgttcgcgcaggaattgaagacaccgtatccggtgtcggtgaagcggctgttgaaagagtgggaaaaaattgaaaaataaaaaaacagcctgaaaagtttcaggctgtttttttatttgactaatcgaagtttcctatatctatttaagtccctctcaactaatccaaaagttaaatcagcaacatctttgggggatacgtttaaattttcagcaatctgttcaataccaatgccatcattttttaaaatagtaagcattttacgtaatgcgcttgatatttccctttccattggctctggttcgatagttcgatattttttctttgcaaacaaaggacaaagattgtgtatatacatcctatcagtaatcattcctaatttatgcatccgatatgctaaggcaacaagtgatacaccaaatcgtcttttgatttttaataaattttcaatagtgataggaacatgacgatataagcgtagtgcagcctccggcattaaaaaagctgaagcaaaggcattagcctctttttcgataatatcacgaggttcatcttctgtaatttcactatttttactatgttccatactgtatttatcacggattaagtgccctaattcatgggcagcatcaaatcgactacgttctgcagatttttgtgtatttaaaaatacaaatggatgattttcataccaagtacaaaaggcatcaatgtcctttgtatctaaagataatgaaaatacacgaacacccttaacttcaagtagggtgatcatattcggaataggttcattgccaagcccccattctaatcttagttcctgagcagcctcttcaggagaaatatcagaaaaatcaggcaatacggcttgacttagtgtaaattctgtctcgagccagtcatttaacaaaaaagccgtaatgctatgatttaatgcttgtttttcaagcctcttcgaggtgcgtgaacgagcacgaaaacttactgcctgagatttcaactcaggcagtctttcgtcattagtaaagaaatgaactggaaactctaataaattggctaattcatttaaatcaggtatttgctcatcttttacatagtttctaacctgtcgagcggtaatacctaataactcagctaattttgtttgcgtacaaccacgtttatccagcgcaaattccagtctctcacgattaaatgtctgcatgatttatcattcaaattatcctgctttttgttttctttcaaccaaaggctcatattcttcaacaggttgcttacgttcaagctcatcaaatttagttaaatcaacatcagctaatataattcgctgcttgtacccagttatttgatgactaacaaaaccactcggtaaagataattcaagttgcactttattatacttccagtgaaacagcagaacccaaaactgcacagtatcaggcaaatctagttttgaattacgaatagcctcctcaaatcccttacctttccttgcggttgtcattggcatcccgtgatgcctaccaacatctgaagtagcagtagccacaataatacttttagttcgacatggcgagagacatagaaatgcaccacccgaccaaggctcaagcgtccagccatctttacttaaatatacccttagagcaaatgtaatttctgcttgccgatacatccccaatgtatttctgtcagataatgctgctttgtcctgaatattattatgcgcagtaagtacaatctctttaagcatctcctgagataagtacttgctgatttcacttaaagcaatatcactattttgttgctcgactatttctcctacttcaaatgggaaaggttctgataatgcaaattccaccataaaaatttcctaattttatacgtaatgtttacacaatatatcaggaaatatgaaaacgtacaactatatctataaagcaattaataagtagcctgcccaaccgtgtccttatctttcggcacacccgacctgcaaatcacgcaaaacttggaatccgtgtgtagggtgtgtgcggtacatacgcacgcagtctttttaaaccacagcccttcccaactaaaccaaaaggtcgtctgaaccctattttcagacgaccttttgccactttgtaaaacaaatcttcccaccatcctctccccaaacatcgcccgaaccagtaaacttctcatatttcaacaactccttggaagcaaaccatgtctggtatctacctaccccgcctattcccgccccatatcgccgaacgcggcctgttgtattttcagcagggcaaggttctcgatgtccgaaaaacttccgccgggcattatcgggcggaggtgtgcggttcggaaaactattgggtatagttgaagctggatagtgatttgtatattaaagacgaaggctgcaattgtccttatatctaagagtgcaaacataccttaaattactatattgcataggcaaaatacaagcctataacgaattggaaacaaaatgccgtctgaaaacatcttcagacggcattataaaatctgttcaccttttcagatgagtaatgtacacccttatacaatttttgctactatgccccataaatccacggctaaagatatccttattatgtcctatgatttatcgaaacgacttgtaatcggcttagcatcaagtgccctattcgacttatccgaatcggataatatatttagaatggaaggggcagaaacctataggcaatatcagagagaaaaacaaaaccatcccctaaaaaaggcgttgtctttccatttattaaaaaacttctgtcaatcaatgaaataaacccaaacgacccaacgattgggtttattcttttatccagaaacaatccagatacagattacgagtcataactataggcttaatattacacgattctcattccatcaaggcggaaaaccgcacaaatactgaaacactatcgatcgatttgtaaacaagcctacttaagtaacttgcagtccttatcatttcctttaaaataatccagcccgtcactacacgaactggcggacttcttgcaaataaaggttactagattttcattcatcttaataataaaaggatttttatctttatctatggctaccgccttcaacatgaatttactgtctaaagccccgcgcgcgattccattcaaacggatacaaaagccttctgcctctttaatcggcaaacttggccacttggtagatgtttgtttaaacctcccattctgcagataaaacttttccataaaatgtgcattttctaacaaggctgcccgcactgcatttatctttgctttctcaacataattgcgatagctcggataaacaattaaagcaagtacagacaatatcaagaccactgatattaattcaaccagcgtaaacccccgattatcagtcattactttacttccaataagaacagattattcaacatatttctttgaacagacttactatcccattcaacagtatgcatatttcccactctattttttagcggccggtatagccggtttggctgggccttttggtgcgggcgcgccgaccgaagcctggtccttcagcttcgccagcaccgcagggccgatgccctttaccttggtcaaatcgtctacagacttgaacgcaccgttttgcgcacggtattccgcaatggccttcgccttcgccgggcctatgcccggcagcgcctccaactcctgctgcgaagccgcattgatgtttaccgccgcaagggagaaggcgcaggagaacagcatacagaacagcacgaacattttcttcatggtttttcctttaagggttgcaaacaataaaccgcatcttgcgacgataaaacgagtcattctaaaatgaatatcccaaagtttcaagccgttcctccgcaaacccgaccggacaccgtacggatgccgtcccgccatcaccgacattttttccgggcaaagcaaacattttttccgggcaaagcaaaaacccccgaataatcgggggttttctgaatgggtgtttggcagtgacctactttcgcatggaagaaccacactatcatcggcgctgagtcgtttcacggtcctgttcgggatgggaaggcgtgggaccaactcgctatggccgccaaacttaaactgttacaaatcggtaaagccttaatcaatatattcggtaatgactgaatcagtcagtaagcttttatctcttgaagttcttcaaatgatagagtcaagcctcacgagcaattagtatgggttagcttcacgcgttaccgcgcttccacaccccacctatcaacgtcctggtctcgaacgactctttagtgcggttaaaccgcaagggaagtctcatcttcaggcgagtttcgcgcttagatgctttcagcgcttatctcttccgaacttagctacccggctatgcaactggcgttacaaccggtacaccagaggttcgtccactccggtcctctcgtactaggagcagcccccgtcaaacttccaacgcccactgcagatagggaccaaactgtctcacgacgttttaaacccagctcacgtaccactttaaatggcgaacagccatacccttgggaccgactacagccccaggatgtgatgagccgacatcgaggtgccaaactccgccgtcgatatgaactcttgggcggaatcagcctgttatccccggagtaccttttatccgttgagcgatggcccttccatacagaaccaccggatcactatgtcctgctttcgcacctgctcgacttgtcggtctcgcagttaagctaccttttgccattgcactatcagtccgatttccgaccggacctaggtaaccttcgaactcctccgttacgctttgggaggagaccgccccagtcaaactgcctaccatgcacggtccccgacccggatgacgggtctgggttagaacctcaaagacaccagggtggtatttcaaggacggctccacagagactggcgtctctgcttctaagcctcccacctatcctacacaagtgacttcaaagtccaatgcaaagctacagtaaaggttcacggggtctttccgtctagcagcgggtagattgcatcttcacaaccacttcaacttcgctgagtctcaggaggagacagtgtggccatcgttacgccattcgtgcgggtcggaacttacccgacaaggaatttcgctaccttaggaccgttatagttacggccgccgtttactggggcttcgatccgatgctctcacatcttcaattaaccttccagcaccgggcaggcgtcacaccctatacgtccactttcgtgttagcagagtgctgtgtttttaataaacagtcgcagccacctattctctgcgaccctccggggcttacggagcaagtccttaaccttagagggcataccttctcccgaagttacggtatcaatttgccgagttccttctcctgagttctctcaagcgccttagaattctcatcctgcccacctgtgtcggtttgcggtacggttcgattcaaactgaagcttagtggcttttcctggaagcgtggtatcggttgcttcgtgtccgtagacactcgtcgtcacttctcggtgttaagaagacccggatttgcctaagtcttccacctaccggcttaaacaagctattccaacagcttgccaacctaaccttctccgtccccacatcgcatttgaatcaagtacaggaatattaacctgtttcccatcgactacgcatttctgcctcgccttaggggccgactcaccctacgccgatgaacgttgcgcaggaaaccttgggctttcggcgagcgggcttttcacccgctttatcgctactcatgtcaacattcgcacttctgatacctccagcacactttacaatgcaccttcatcagcctacagaacgctcccctaccatgccggtaaaccggcatccgcagcttcggttatagatttgagccccgttacatcttccgcgcaggacgactcgaccagtgagctattacgctttctttaaatgatggctgcttctaagccaacatcctggctgtctgggccttcccacttcgtttaccacttaatctatcatttgggaccttagctggcggtctgggttgtttccctcttgacaacggacgttagcacccgctgtctgtctcccgaggaaccacttgatggtattcttagtttgccatgggttggtaagttgcaataaccccctagccataacagtgctttacccccatcagtgtcttgctcgaggcactacctaaatagttttcggggagaaccagctatctccgagtttgtttagcctttcacccctatccacagctcatccccgcattttgcaacatgcgtgggttcggtcctccagtacctgttacggcaccttcaacctggccatggatagatcactcggtttcgggtctacacccagcaactcatcgccctattaagactcggtttccctacgcctcccctattcggttaagctcgctactgaatgtaagtcgttgacccattatacaaaaggtacgcagtcacaccactagggcgctcccactgtttgtatgcatcaggtttcaggttctgtttcactcccctcccggggttcttttcgcctttccctcacggtactggttcactatcggtcgatgatgagtatttagccttggaggatggtccccccatattcagacaggatttcacgtgccccgccctacttttcgtacgcttagtaccgctgttgagatttcgaatacgggactgtcacccactatggtcaagcttcccagcttgttcttctatctcgacagttattacgtacaggctcctccgcgttcgctcgccactacttgcggaatctcggttgatttcttttcctccgggtacttagatggttcagttctccgggttcgcttctctaagtctatgtattcaacttaggatactgcacagaatgcagtgggtttccccattcggacatcgcgggatcattgctttattgccagctcccccgcgcttttcgcaggcttacacgtccttcgtcgcctatcatcgccaaggcatccacctgatgcacttattcacttgactctatcatttcaagaacttctttgactttgcctaacattccgttgactagaacatcagacttgaatttcctactttgataaagcttactgctttgttgtgtcttaatcctgccttttgtgtttcaggattaagtcgatacaatcatcacccaaatactgtgtttgttttcttttctcttgcgagagatttttatcctttgcaaagaataaaaaatcaaaacaaacgctttgtctttgtttgttgatttcggctttccaatttgttaaagatcgatgcgttcgatattgctatctactgtgcaaatcaaaacgagctgattattatatcagcattttgttcttggtcaagtgtgacgtcgccctgaatggattctgttccattcttccgttttgatttgtacagtattggtggaggcaaacgggatcgaaccgatgaccccctgcttgcaaagcaggtgctctaccaactgagctatgcccccgttcttggtgggtctgggaggacttgaacctccgaccccacgcttatcaagcgtgtgctctaaccagctgagctacaaacccggattctcttcttaagcgaatcttgccttcactcaagcttcttccgcatctttttcagtttaccgataagtgtgaatgcctaaagcctcttctttctctagaaaggaggtgatccagccgcaggttcccctacggctaccttgttacgacttcaccccagtcatgaagcataccgtggtaagcggactccttgtggttatcctacctacttctggtatcccccactcccatggtgtgacgggcggtgtgtacaagacccgggaacgtattcaccgcagtatgctgacctgcgattactagcgattccgacttcatgcactcgagttgcagagtgcaatccggactacgatcggttttgtgagattggctccgcctcgcggcttggctaccctctgtaccgaccattgtatgacgtgtgaagccctggtcataagggccatgaggacttgacgtcatccccaccttcctccggcttgtcaccggcagtctcattagagtgcccaactgaatgatggcaactaatgacaagggttgcgctcgttgcgggacttaacccaacatctcacgacacgagctgacgacagccatgcagcacctgtgttacggctcccgaaggcactcctccgtctccggaggattccgtacatgtcaagaccaggtaaggttcttcgcgttgcatcgaattaatccacatcatccaccgcttgtgcgggtccccgtcaattcctttgagttttaatcttgcgaccgtactccccaggcggtcaatttcacgcgttagctacgctaccaagcaatcaggttgcccaacagctaattgacatcgtttagggcgtggactaccagggtatctaatcctgtttgctacccacgctttcgggcatgaacgtcagtgttgtcccaggaggctgccttcgccatcggtattcctccacatctctacgcatttcactgctacacgtggaattctacctccctctgacacactcgagtcacccagttcagaacgcagttcccgggttgagcccggggatttcacatcctgcttaagtaaccgtctgcgcccgctttacgcccagtaattccgattaacgctcgcaccctacgtattaccgcggctgctggcacgtagttagccggtgcttattcttcaggtaccgtcatcagccgctgatattagcaacagccttttcttccctgacaaaagtcctttacaacccgaaggccttcttcagacacgcggcatggctggatcaggcttgcgcccattgtccaaaattccccactgctgcctcccgtaggagtctgggccgtgtctcagtcccagtgtggcggatcatcctctcagacccgctactgatcgtcgccttggtaggcctttaccccaccaactagctaatcagatatcggccgctcgaatagcgcaaggcccgaaggtcccctgctttctctctcaagacgtatgcggtattagctgatctttcgatcagttatcccccactactcggtacgttccgatatgttactcacccgttcgccactcgccacccgagaagcaagcttctctgtgctgccgtccgacttgcatgtgtaaagcatgccgccagcgttcaatctgagccaggatcaaactcttatgttcaatctctaactttttaacttctggtctgcttcaaagaaaccaacaggacaatgttcaaaacattatcttgtctgtctttcaaacagtgtgagactcaaggcactcacacttatcggtaatctgttttgttaaagagcgttgcgaattataaagtattccttccgcctgtcaagatatctctcgatatccccaacattctgtgctatacttttcagttcgtccgccacttctgcagcagcgaagaaccgaactatacgcccacagggaaaaacggtcaatgcttttctgaagaaatttttttaaaaatatttatctatttgtttataaatttaatttatatcagtcaattttattttccatacagaattcttccagtgcccgatggatattttcagtctgccattcgttttttaagggtgcaacaatttcgatttgtcggttttggtagtcaaattgtattttccatgcatacagaaacatggtttcggattctgttccgccgtataagctgtcgcccagaatcggactgcccaaacttttcatcgccactctcaattggtgcgttttgcccgtatgcggttctaggatgaacagccgcagtttttcggcgatactgatgctgtggaatcgggtaacggcgatattttctgtattgcgcgtcaacttccacattccacatctggatttttccattccgcctttaatccaaccctgctttttggacggcttgcggtcggacagtgccaaataggtttttttgatgcttttgccggcaaactgtccgctaagggcggacgcgctttctttgttgagggcaaacagtaaaatgccgctggtctgtttgtccaatcggtgcagcagccacacacgctctacgcccaactgtatggcgagtgttcgggccagtccggtctcgccgctgtcttggtggacggatatgccgcccggtttgttgatggcgacgaagtcttgatggcggaacaaaatttccaacatatccatatatgccttgcaaaaatagaagggttcaattttcgtgttgatgttcggcaaggattttttcgtacacagcttgcggcacgtagcggtggatcgtttccgtccagccttccggcccgaccagtcctttgaccatagtggacgacacttcggcgatttcgcgcggcggcatgaggaatacggtggatatttcgggggcgaggtcgctgttgatatggcgcatggaacgttcgtattcgtaatccgaagcagaacggatgccgcgcacgatgaatcctgcatctacctcacgggcgtaatgcaccagaaatcggttttcaaatacatcggttctgacgttgggaaacattttagtaatatcgcacaacatatcctgcctttcagcgacggtataggtgctgcgtttgtcggggttaatgccgatggcgacgatgagttcgtcaaacatagattgcgcctgccgtatcatccacagatgccccaatgtgggcggatcgaaactgccggcataaacggcgcggcgcggtgtattcggtaacatttgattcctcccggcttcatagtcggctgtgtgttggtgcgtgtgcatccgtattgtatgcccaaagtaaaatgccgtctgaagcattttcagacggcatagtcggacggcgttttaccggcatcaatcctcgccgtttaaagacaacaggatgttcagcaggctgctgaagatgttgtaaagcgagataaacagtgtcagtgccgcgctgatgtggctgtcttcgccgccgtcgatgacggtgcgtacctgccacataatcattaaggaactgaacaagacaaaaccggcggaaatggtcagggcgagtgcgggaatacccaaaaacagattggcaaccacggcgaccatcagaatgaccgcacctacggtcaggaagcgtccgagcgcgttcatatcgagccgggttcggcgcgccaaggcggacatcgttaaaaagacggcggcggtcatcgcggcggcaatgccgacgattttcgcaccgtcggcaatatggagcgcgtattgcagcacggggccgatcaatacgcccataccgaatgtgaataccatcagcagggtaacgccggtattgctgtaacggtttttctcgatgaagtggatcataccgtagaaaaacgccaacacgacggcaaaccctatccagcgcgaaccgaaggcggcgtaaaaattgaaaccggcattggcggcaagtgccgcgcctgcggaagccggaataaatgaaaatccgagcaggcggtaggttttctgcaggacggtgtttttagaaaccgtatgcgcggtgtagtcgtaaacgtcgtgttgcatatcatctgctcctgaaagcgcggttgggaataatgggggattttaacattgcccaatgtcaaaatttgtccggttgcgtgaagataaagttgtccggcgtattttaaaggccgtctgaagcagtttcggacagcctgtgttcaaaacggaaaaccgttattgcggaacgtatccctgaacggcatccgcgccgtcgccgaagaaatactgctccatctgctgagccaggtattcgcgcgcgcgcggatcggcgaggcttaaacggttttcgttaatcagcatcgtttggtggcgcgtccacgccgcccacgcttcttgcgatacgttttcaaaaatgcgcttgcccaattcgttgggaagcggcggaaatttcatgccttcggcttctttgttgagcttgacgcagaataccatgcgtgccatagcggattcctttgctgtgttcagaaataacggggtgattttaaccgattagggatacggacaaaagccttcttattcccgatgatagggatggttgtgcaggatggaaacggcgcggtagagctgctcggtcagaaagacgcgcaccatgccgtgcggcagggtcaggctggacaggcgcatcatcatgcgtgcctgctgtttgaggcggtcggtcatgccgtccgcgccgccgatgacgaagcagacgtgttcgccgttttgccgccagcttttgaggtgttccgccagctcgacggaggtcggtgctttgccgcgttcgtcaagaacgacgaggaacgcgccttgcggaatggcttcaaggatgcgtttttcttccgccgccataccttgggcggcattcacgcccgcgccgcgtttttcgggtttgatttctttgagtgcgtaggcgacgtcgcgtccgaagcgtttggcgtattcggcgacggcctcatcaacccagcgcggcattttggtgccgactgccaaaacggtgatgttcaatgctttctcccttacaggaaaatgccgtctgaaggttcagacggcatcgggaatcagtctgccgcgtgccacggcttctgcattccggcgtggaaactcggtttctcgccgccccagagggtgtcgatgtcgtagaagtcgcgcacggcagggagcatgacgtggacgacgaggtctcctgcatcaaccagcgtccattcgccgctgtcgccttcggtactgaggatttcaaaaccggcttctttcaaatcgacggcaacgttgttggccagtgctttgacttggcgcgtactgtcgccgctggcgataatcattctggcaaacagcgaagttttgtcttgggtttcgagaacggaaatgtctttggctttgatgtctccgagggcgttgacggcgaccccgaccattttttgcaggtcttgcagttcttgttcgttcattattttcctaacgggatgttttcagacggcattatagccgtttcttactgatttgactttatttttcatacaaaccgtgttcgcggatgtagcgtgcggcggcaggcgggatgccgtctgaaacgccttggccggcaaggttgcggcggatttccgttgacgacacattatgcatcggggcggacaagatgcggacgctgccgtcctgaagggacttgcccagccacgcgtgcagttcgcgcggggtttggtgcaggctgtcgccctgcctcatggcgacggcgatattggtttcgcgcacgagcatctgccattttttccatgtgtgcagcttcatcaggctgtcgctgcccatcagccaccagagttgcgcggatgggaactgctggcggaagatttggacggtatcaaaagtataggttgcaccttctcggacgatgtcgcaatcgctgacggcaaaacgcgcgtcttctgccgtcgccaattcgaccatggcaaggcggtcggcggcggaagcggaggctgcgtctttgtgatacgggccgcctgtcggcaggaaaacaaccgcgtccaagccgatttcgtcggcaaaggcacgggcgatatgaagatgtccgttgtgtatcgggtcgaaagtaccgccgaacaatccgattttcttcatgatgtttccattccttccgataagtccatgccgtctgaaacactgccgtccacaaccagcgtcagtttgccggtaacgggatggatgaccagtccgtgaacggcgatatggcgcggcatcagcggatggttacggataaggtccaccgtgtggcgcacgctgtcttcgacgttgtcgaaaccggtcagccagccgtcgaggtcgataccggcataacgcagggtttcgatacggtcttcgggaatccggctttcccggacgcgcccgaggaattcttcggcattcagcccctgcataccgcaatcgtgatgggcgatgaccataatctctctgaccttcagttcaaacacggcaaccaaaaggctccgcatcaccgaaccccacgggtgcgtaaccagcgcgccggcatttttaatcagcttggcatcgccgtttttcaaacccaacgcgtcgggcagcagcccgataatccgcgcatccatacaggacaaaactgccagcccgcgttcggggtatttgtcggtaaagtatttttcatattcgcccgactcgacaaactgccggttatgggcaaggatgttatccaactcgctcattttgccgtcctctgaaaaagggttcacattataacgtttccgtctgttttccgccttcgccgccgtccaacagcaggaaaatacccagcgcgaacgccgccaacagcaatgtcagcaccatcgcccgcgcgtaattatcctcacccgcgcgtcccaaataggcataaatcaaagtcgtcagcgtctgccattccggacgcgacagaaacaatgtcgccgcaaattcgcccacgcaggttgccgccgccaaagtcagaccgcgccgcaacgccggtttcaagagggggaacgtgatgcggcatgccgtctgaaagccgtttgcacccaaacccgccgccgccctgccgtaatccggcggcagtgcatcccaggctgataaaacatcttttgccacaaacggatacgccagcagcgcatacatcgccagcagcaacggcaacgaagccgtccactgcggataaagcagcagcacgcccgccgaaacacaaaccggcgacaccataaacggcaaaaacatcagcccgcgcatccacgccgaccgccgcgccgccgccgcatacaccacacccaaaaccgccgccgcatacaccgccgccgccgagaagcgcaaagtattccacaccgcctgccacgtttcactttccattaacacacgccacgattcgccggccgaccacgctttcacaacaattgccaacaaaggaaacaggcagcacacagacaacaccgccgccgcaaacgccagcagcacatattccccgaccgactgcggcggcgacggcatcacaggggaaaccgccttatccgaaaccgcgcgcctgccgaaccacgcatacagcaaccctgccgccgccgttacccccaacaccagccacaccagcaccgaagcaaccgccatatcgagttcgaacatgaccaactggtaaatttccacttcgaccgtggcataacggctgccgcccagcagcagcgccagcccgaacccggaaaaacaatacagaaagacaaggcacacgccgccggcaagccacgggcgcaaaacgggcatttcaatgtcccaaaaccgccgccacgcccccgcgcccaacgtccgtgccgtctgaagccgtgccgcaggcacttgcacaaacccctgatacgccgccctgaccaacacaggaaggttgaaaaacacattgccgtacaacaacagatacggcgtatcctgcctgccgcgccacaacagcccgtccgccccgaacagggccagcacgcccacgcccgccaccaacgtgggcatcacaaaaggcagcatcagcaggcgcagcaccaaagcccgccccggaaacgccagccgcgccagcacccacgcgacaggcacgcccaaaggcagcaccagcacacaggttgccgctgcctgaaataccgtccacgccaaacgtttgagcatataggcatccgacagcaccgcgcgccacgccaaaccgtcatacgccgccaccgcccacaaaggcgcaacgaccattaccgccaaaaaagccgaaggcagcagggcaaaagcaccccataccacccaacgccgtccatccatcgccttccccacttgaaacactgatgttgcgattgtacccaaaagcccccacataccgtatatttcaatccgactacataccgtatccgccttcctcccgccgtctgaaatatagtggattaacaaaaatcaggacaaggcgacgaagctgcagacagtacaaatagtacggaaccgattcactcggtgcttcagcaccttagagaatcgttctctttgagctaaggcgaggcaacgccgtactggtttttgttaatccactataaatcgttcaaataaacaggaatataacttcagacaaacaacttaccgcccgatttgtgctatcgttttcgcacaacttaaaaaaacctgacaattttgtacttttattacagagaaaggctttacaaatggacggctggacacagacgctgtccgcgcaaaccctgttgggcatttcggcggcggcaatcatcctcattctgattttaatcgtcaaattccgcatccacgcgctgctgacactggtcatcgtcagcctgctgacggctttggcaaccggtttgcccacaggcagcattgtcaacgacatactggtcaaaaacttcggcggcacgctcggcggcgtggcgcttctggtcggcctgggcgcgatgctcggacgtttggtcgaaacatccggcggcgcacagtcgctggcggacgcgctgatccggatgttcggcgaaaaacgcgcaccgttcgcgctgggcgttgcctcgctgattttcggcttcccgattttcttcgatgccggactaatcgtcatgctgcccatcgtgttcgccaccgcacggcgcatgaaacaggacgtactgcccttcgcgcttgcctccatcggcgcattttccgtcatgcacgtcttcctgccgccccatccgggcccgattgccgcttccgaattttacggcgcgaacatcggccaagttttgattttgggtctgccgaccgccttcatcacatggtatttcagcggctatatgctcggcaaagtgttggggcgcaccatccatgttcccgttcccgaactgctcagcggcggcacgcaagacaacgacctgccgaaagaacctgccaaagcaggaacggtcgtcgccatcatgctgattcccatgctgctgattttcctgaataccggcgtatcggccctcatcagcgaaaaactcgtaagtgcggacgaaacctgggttcagacggcaaaaataatcggttcgacaccgatcgcccttctgatttccgtattggtcgcactgtttgtcttgggacgcaaacgcggcgaaagcggcagcgcgttggaaaaaaccgtggacggcgcactcgcccccgtctgttccgtgattctgattaccggcgcgggcggtatgttcggcggcgttttgcgcgcttccggcatcggcaaggcactcgccgacagcatggcggatttgggcattcccgtccttttgggctgtttccttgtcgccttggcactgcgtatcgcgcaaggttcggcaaccgtcgccctgaccaccgccgccgcgctgatggctcctgccgttgccgccgccggctttaccgactggcagctcgcctgtatcgtattggcaacggcggcaggttcggtcggttgcagccacttcaacgactccggcttctggctggtcggccgtctcttggacatggacgtaccgaccacgctgaaaacctggacggtcaaccaaaccctcatcgcactcatcggctttgccttgtccgcactgctgttcgccatcgtctgacagacggaaaggatagtaaatgactacgcattttgtcgttatgggcgtatgcggctgcggcaagaccaccgccgcgctgtccctgcagaaacacctcggtcaatgtccctatgccgaaggcgacgagttccacacccaagccaaccgcgacaagatgggcgcgggtattccgctgaccgatgaagaccgctatccgtggttgggcaatctgcgcgactggatgacgcaacaggcgcaaaacggtgcgaaccacaccatcgtaacctgttccgccctcaaacgcggctaccgcgacattctgcgcggagccgaaggcaaagctgccttcatccacctcagtccgccgcaagacatcaacctcgagcgcatgatgtcgcgcaaaggacattacatgaaagcagggatgctcgattcgcaactggaaatcctcgaggaactgggcgaaggcgaatacggggtcaaaatcgccaaccccggcacgcccgaagcggtcgaagccgatattctgaactgggttgcctcggaaaacctgctttgaagcaatatgccgtctgaagcccgacacaggatgggtttcagacggcataaacatcgggaacagaatggattacattgatttatagtggattaacaaaaaccagtacagcgttgcctcgccttagctcaaagagaacgattctctaaggtgctgaagcaccaagtgaatcggttccgtactatctgtactgtctgcggcttcgtcgccttgtcctgatttttgttaatccactataaaatggaaaatacccggctatcgtctcattttcgttttaatcagccataaaaatgccgtctgaaaccctttcagacggcatttctgtcaaacgccggacgcactcaacccaaactcaacagcaggttgcggaacgcgttcgggtctttgataaacgtcatctcgcccgcctgcggaaaatgaaaatccaacaggcgcgacacccaaaaacggatgcagccggcacgttgggcggtcgggaaatacgccttttcttcggcactcaaggggcgcacgccctcataaccgccgataaacgcctttttcaacgcctcatccaacttattgtccgccgtccttgcccaatcgttgaccgcaatcgccaagtcatacataaaattgccccggcaggcgtaatagaaatcgatgaagcccgatacctgaccgccgtcaagcaacacattgtctttaaacagatcggcatggatgatgcccgaaggcagatgattgccgagattgtccttcaacgcatcgatttcggaacacagcagtgcggcatcgtcttgcgacaggacgggcagcagccgggcgcacgcctccgtccaccacgcattgtaacgcgggttttccatttccaaagggaaatcggcggcggcaaggtgcattttcgccaacatcgcaccggtatgaaaacactgctcagccgtcggcagcgcggtatccgaacctttcaggcaggcaaccaggcaggcaggcttacccgccaaaacggaatcaagccggccgtctttgcgcgcaaccggcgcggcaaccgccacgcccttcatactcaaatgccggttaagctccagaaaaaacggcagctcttcctgtttcaacacttcaaacacggtcagcacataacgtcccgaagtcgtcgtcagaaaataattgctgttggtaatcccctgcgcgatgccctgcagggaaacaaattcccccaaatcgtaaccgctcaggaagccgcgcatttcatcatcggaaacactggtatagacagacatatcaactcacttgctcaaaaacgggcaaacccgccgtcagaacgccggacggcaggcaaacatataattcacatcggtcgaatcgcacagggcataagtttgcgacaacacatggtaagtcatacccttcgtatccgccacatccaagcctgcctgacggcacattcgcgccagctcggcaggtgcgatgaattttttccagtcgtgcgtgcctttggggacaaacttcaacagatattccgccgccacaatcagatgcaggtacgatttcgggtttttattgatggtggaaaaaaacaccatgccgtccggtttgaccagattggcacaagcacgcacgatggcggcgggatcggggacgtgttccatcatttccatgcacgttaccacatcgaacgagtgcggttccgcctcggcaaggtcttccacgcggatacattcgtattcgatatcggcgacattgttcaaagccgcgtgcaggcgggcggtttccaacgactgctccgccatgtcgatgccctttacaaacgccgcgccgcgccgcgccatactttccgccaagatgccgccgccgcagcccacgtccaaaacccgtttgccgcacaaatccgcgtgtccgtcgatataatccagccgcagcggattgatgtcgtgcaaggttttgaactcgcccgacttgtcccaccatttgtcggcaatccggctgaatttggcgatttccccctcatcgacattatattttttgtcggacattttccctcccatctgacgaaccgcccactccaaaacccaagattatactatggaacacaatgccgtctgaaagccttttcgggcggcgcggcgcaaataccttacaaatccttacactttacggcataatggcggctcgctttttctggcagaaagacaaaatatgcccaacaaaaccccttcactgttcggcggcgcgatgattatcgccggcacggtcatcggcgcaggcatgctcgccaacccgaccgccacatccggcgtatggtttaccggctcgctggccgtgttgctgtacacctggttttctatgctttccagcggcctgatgattttggaagtcaacacccattatccgcacggcgcaagtttcgacacgatggtcaaagacctgctcggacgcggctggaacatcatcaacggcatcgccgtcgccttcgttttatacctgcttacttacgcttatatcttcgtcggcggcgacctgaccgccaaaggcttaggcagcgcggcaggcggcgacgtttcactcaccgtcggacaactcgtcttcttcggcatcctcgccttttgcgtatgggcatccgcacgcttggtcgaccgcttcaccggcgtccttatcggcggcatggtattgacctttatttgggcggccggcgggctgattgccgatgccaagccgtccgtcctcttcgatacccaagcccccgccggcacaaactactggatttacgccgccaccgccctgcccgtctgcctcgcttccttcggcttccacggcaacgtctccagcctgctcaaatactttaaaggcgacgcgcccaaagtggctaaatccatctggacgggcacactgattgcgctggtaatttacgtcctctggcaaaccgccatccaaggcaacctgccgcgcaacgagttcgcccccgtcatcgccgccgaagggcaagtctccgtcctcatcgaaaccctgtccaaattcgcccaaaccggcaatatggacaaaatattgtccctgttttcctatatggcgatcgccacctcgtttttaggcgtaacgctcggactcttcgactacatcgccgacatcttcaaatggaacgacagcatctccggccgcaccaaaaccgccgcgctgaccttcctgccgcccctgatttcctgcctgctcttccccaccggcttcgttaccgccatcggctacgtcggcctggcggcaaccgtctggacaggcatcatccccgccatgctgctctaccgttcgcgcaaaaaattcggcgcaggcaaaacctataaagtttacggcggcttgtggctgatggtttgggtcttccttttcggcatcgtcaacatcgccgcacaggtattgagccaaatggaactcgtccccgtatttaaaggataaaggcaaaatgccgtctgaagcccgccggcggcttcagacggcattgccgcaacaaacggcaaccgtattccggcacacagcgcattaccctgcccctcacgcacaaatcccgccccgacaaaccgggacgcaaccataaaggaacaatgatgaagctcaaaatagacattgcaaccaacaacttcaaacacggcggcggcacggaacgctacacattggatttggtaaagggtctgaacagacaaaacatcacaccggccgtttatgcgacgaaatttgatcacagcattcctgaatacgccctaatcgaaccccatcttgtcgatcaacaccggacgctgaaaaaactacgctcattcctcttttcaagccggctcgctcaaaccagaaaaaacagtgccgccaaactgattgcctgccaccacgccgattacgccgacctcctcatctgcggcggcacacacttgggctacctgcaccatatggcgcaaaaaccgaacctgctcgaccgcctcgccatacgccgcaaccgcagcaactacgccaccgccaaactgattatggcgcattcccatatgatgcggcgcgaactggtcggactgtacggcgttccccctgaaagaatccaagtcgccccccccccccgcagatacggaacgcttctttccacaacccggagaaactgccgacctgcgcgccaaatacggctttgccgaccatgaaaccgttttcctgttcccatcgaccggccacacgcgcaaaggtctggaactgcttgccgactttttcgaacataccagcctgcccgtcaagctcgccgttgtcggctccccgcttccccgccctatgaaaaacgtcgtcggactgggcttctgcaccgatatgcccgaactctaccgcgccgccgactttaccattatggcttccctgtacgaacccttcgggctggtcggcgtcgaatccgtcctatgcggcacacgcgtcgtcctctccgaaaacatggcatgtacagaggtcatgaacgaagaagccggcttctttttctcacgccaaaacccggaaaccctggcgcaagccgttgcccaagccgtcagccttaaaaaacagggcggacaccgcctgtccgacccgatgcgggcactgaactacaacccggctttagacaaacacatcgggctgattcttgaaatgcttgccgcctgaccgcgtccccaaacggcattgccccgcaacttccgcgccgagacttttgcagcggaaaatacgtccggcagaaaatccgccgttgcaggagcaggcaggaaaacatcggcaaccgcccccgaaacgccgtacccgcgcattgcaagcggttgccggaacaggcgcgttatcgcgcggcacaggcgcatttccaccgatatttcagtataatgccacccccgacctgccccaatccaaaggaaacgcgatgaaactcatcattctcgaccgcgacggcgtcatcaatcaggaccgcgacgacttcgtcaaatccgttgacgagtggatacctgtcgaaggcagcatggatgcggtggcatttctgacgcaggcaggctacaccgtcgccgttgccaccaaccaatccggcatcgggcgcaaatattttaccgttcaaaaccttaccgaaatgcacgccaaaatgcaccgcctcgtccgtcaggcaggcggcgaaatcaacggcatctggttctgcccgcacaccgatgccgacaactgcaactgccgcaagcccaaaccgggtatgattgaagacatcatcggacgcttcaacgcccaagcctcggaaacctggctggtcggcgacagcctgcgcgatttgcaggcaatcgatgccgtcggcggcaaacccgcgctggttctgaccggaaaaggcaaaaaaacgctctcccaacacggacacgaattgcccgaacacacacaggttttcgataccctgctcgatttctcacaatacatcatgcaggaaaacaccgcaccgcaagccgactgaacataccgcattccgacaaggcaaaaccatgctcatcatccgcaacctgatttactggctgatactctgttccaccctgattttcctctttccctttatgctgctcgcctcgcctttccgggacggggcgcacaagatggcgcgggtctgggtcggcattctcaactggtcgctcaaacacatcgtcgggctcaaataccgcatcatcggcgcggaaaacatccccgaccgccccgccgtcatctgcgccaaacaccaaagcggctgggaaacgctcgcccttcaggacatttttccgccgcaggtttacgttgccaaacgcgagttgttcaaaatcccctttttcggctggggcttgaaactggtcaaaaccataggcatagaccgcaacaaccgccgcgaagccaacgagcagctcataaaacaggggttggtgcgcaaaaacgaaggctattggattaccattttccccgaaggcacgcgccttgcgcccggaaaacgcggcaaatacaaactcggcggcgcgcgcatggcgaaaatgtttgagatggacatcgtccccgtcgccctcaacagcggcgaattttggccgaaaaactcctttctgaaatatccgggggaaatcaccgtcgtcatctgtccgaccatcccgcacgcaagcggcagcgaagccgaattgatggaaaaatgcgaacatctcatcgaaacgcaacaaccgcttatttccggcgcaggcccgtttgccgccaaaatgccgtctgaaaccgcatgaccgcctttgtccacaccctttcagacggcatggaactgaccgtcgaaatcaagcgccgtgccaagaaaaacctgattatccgccccgccggcacacataccgtccgcatcagcgtcccaccctgcttctccgtctccgctctaaaccgctggctgtatgaaaacgaagccgtcctgcggcaaacactggcgaaaacaccgccgccgcaaactgccgaaaaccggctgcccgaatccatcctcttccacggcagacagcttgccctcaccgcccatcaagacacgcaaatcctgctgatgccgtctgaaatccgtgttcccgaaggcgcacccgaaaaacagcttgcgctgctgcgggactttttggaacggcaggcgcacagttacctgattccccgcctcgaacgccacgcccgcaccacacaactgttccccgcctcctcctcgctgacctctgccaaaaccttctggggcgtgtgccgcaaaaccacaggcatacgcttcaactggcggctggtcggcgcaccggaatacgttgccgactatgtctgcatacacgaactctgccacctcgcccatcccgaccacagccccgccttttgggaactgacccgccgcttcgccccctacacgcccaaagcgaaacagtggctcaaaatccacggcagggaacttttcgccttaggctgacgcggaccggaccgacccgccgctttcagacggcatccgtgccggaacaggcacgcgcccgcccgattcaaaccgcgatgacgctttgccgccggttcggggcaggatggcggcacacacgccgtctgccgcgtttcatttcacaccgctcttccgaaacccgaaacccgcccggtccgacgtgcggtatgaaacgcttaagctgacgcgaagtcttttactgatttgcccgcgaaaatgccgtctgaaaggttttcggacggcattttttttgcgtttcccaggatggcggcggattcgtaaaaggcggtcagggtggattgtaggatgggttgagacctgccgaatccgccgcatctgccaaatctaccgccgtcattcctacgaaagtgggaatctagaacgcggggttaagaaaacctgcatcccgtcattcccacgaaagtgggaatccagttttttgagtttcagtcatttccgataaattgccttagcattgaatgtctagattcccgactgcgcgggaatgacgaatccatccatacggaaacctgcaccgcgtcattcccacgaaagtgggaatccaggacgaaaaatctccagaaaccgttttatccgataagtttccgcactgacagacctagattcccgcctgcgcgggaatgacgaatccatccatacggaaacctgcatcccgtcattcctacgaacctacattccgtcattcccacgaaagtgggaatccagaatcccagactttcagataatctttgaatattgctgttgttctaaggtctagattcccgcctgcgcgggaatgacgggatttgaggtttctgttcgcgtcattcccacgaacctgcatcccgtcattcccacgaaagtgggaatctagttttgtcggtgcggaaacttatcggatatagtggattaacaaaaatcaggacaaggcgacgaagccgcagacagtacaaatagtacggaaccgattcacttggtgcttcagcacctgagagaatcgttctctttgagctaaagcgaggcaacgctgtactggtttttgttaatccactataaaatggtttctttagattttacgtcctagattcccgcctgcgcgggaatgacgattcgggcactcctgacagggtaaattcacaggatagcgattcgtagcaactgcatcccccccccccaacaactccccaaacaacgccgctcgccctgggcgtttgccgtttccctgcaaaatctgcgatacaatgcagtctgaacatttatccgaatcccaaatccgatggataccgcacaaaaacaacgctgggcaataaccctatcctatgacggcagccgcttttacggctggcagaaacaggctgacggcgtaccgaccgttcaggcggcattggaaaccgcgctcgcccaaatagcaggggaagcggtttccaccaccgttgccggcaggaccgacaccggcgtgcatgccaccgcccaagtcgtccacttcgacacaactgccgcccgtccccaacaggcatgggtgcgcggcgtaaatgcccacctgcccgaaggcattgccgttttgcacgcccgacaggtcgcccccgaatttcatgcacgatttgacgcatacggacggcactaccgctacctgctcgaatccgcccccgtccgttcccccctgctcaaaaacagggcaggctggacacacctcaaactcgacatcgggcagatgcggcaggctgccgccttattggtcggcgaacaagacttctccagcttccgcgccgccgaatgccaagcaaaatcccccgtcaaaaccatctaccgcgccgaccttacccaaagctcaggactcgtccgcctcgatttgcacggcaacgcctttttgcaccacatggtacgcaacatcatgggcgcgctcgtttatgtcggcagcggcagactcagcgtcgaaggcttcgccgcactgattcaagaacgcagccgcctcaaagccccgccgaccttcatgcccgacggactttacctgaccggcgtcgactatcccgaggcatacggcatcatccgcccccaaatccccgaatggctttaaaacatgcttgtcgcggagattttgaaatcggacaaactgtcaggcaatctttttccatgttgacactacctcatcaaggtactaacattgttattacataaacaggtgaatatggtacgtatatgattctcaacatacgcaaaatgggaaactcgcaaggcgtgattctgcccaaatcattattgggtcaaataggggcagtagacagcttggctgttacagttgaaaagggcaatattattttaagctgtcctaccgttcgcaggggatgggcagaagctgccgcaatgcttgtcgaaaccgagcaggagcattttttttccgaaattgaaaacgaagcggataaagaatggatatggtagtacgcggcggaatctatctggtctccttagacccgaccgtaggaagcgaaatcaaaaagacacgtccttgtgtcgtagtctctcctcctgaaatacacaactatctcaagactgtgctgatcgttcccatgacgagcggaagccgtcctgccccgttccgcgtcaatgtccgctttcaggataaagacggtttgcttttgcccgaacagattagggctgtggataaagccggattggtcaaacatcttggcaatttagacaacagtacggctgaaaaactgtttgcagtattgcaggagatgtttgcctgattgaatagtctgaatggattgtgttcattatagtggattaactttaaaccagtacggtgttgcctcgccttagctcaaagagaacgattctctaaggtgttgaagcaccaagtgaatcggttccgtactatttgtactgtctgcggcttcgtcgccttatcctgatttttgttaatccactataaagaccgtcgggcatctgcagccgtcattcccgcgcaggcgggaatctagaacgtggaatctaaagaaaccgttttacccgataagtttccgcaccgacagacctagattcccgcctgcgcgggaatgacgggattttaggtttctaattttggttttctgtttttgagggaatgacgggatgtaggttcgtaagaatgacgggatataggtttccgtgcggatggattcgtcattcccgcgcaggcgggaatctagaacgtggaatctaagaaaccgttttatccgataagtttccgtgcggacaagtttggattcccgcctgcgcgggaatgacgggattttaggtttctaattttggttttctgtttttgagggaatgacgggatgtaggttcgtaggaatgacgggatataggtttccgtgcggatggattcgtcattcccgcgcaggcgggaatctagaccttagaacaacagcaatattcaaagattatctgaaagtccgagattctagattcccgcctgagcgggaatgacgaaaagtggcgggaatgacggttagcgttgcctcgccttagctcaaagagaacgattctctaaggtgttgaagcaccaagtgaatcggttccgtactatttgtactgtctgcggcttcgtcgccttgtcctgatttttgttaatccactctaaagaccgtcgggcatctgcagccgtcattcccgcgcaggcgggaatccagaccttaaggcagcggcaatattcaaagattatctgaaagtccgagattctagattcccgcctgagcgggaatgacgaaaagtggcgggaatgacggttagcgttgcctcgccttagctcaaagagaacgattctctaaggtgctgaagcaccaagtgaatcggttccgtactatttgtactgtctgcggcttcgtcgccttgtcctgatttttgttaatccactatctcctgccgcaggggcgggttttgcatccgcccgttccgaaagaaaccacgtgcgcgttttttgccgtctttataacccccggtttgcaatgccctccaataccctcccgagtaagtgttgtaaaaatgcaaatcttaaaaaatttaaataaccatatgttataaaacaaaaaatacccataatatctctatccgcccttcaaaatacacatcgaattccacacaaaaacaggcagaagtttgttttttcagacaggaacatctatagtttcagacatggaatcgccgaaaacgtcggcggtaaatgcaaagctaagcggcttggaaagcccggccggcttaaatttcttaaccaaaaaaggaatacagcaatgaaaaaatccctgattgccctgactttggcagcccttcctgttgcagcaatggctgacgttaccctgtacggcaccatcaaagccggcgtagaaacttcccgctctgtatttcaccagaacggccaagttactgaagttacaaccgctaccggcatcgttgatttgggttcgaaaatcggcttcaaaggccaagaagacctcggtaacggcctgaaagccatttggcaggttgagcaaaaagcatctatcgccggtactgactccggttggggcaaccgccaatccttcatcggcttgaaaggcggcttcggtaaattgcgcgtcggtcgtttgaacagcgtcctgaaagacaccggcgacatcaatccttgggatagcaaaagcgactatttgggtgtaaacaaaattgccgaacccgaggcacgcctcatttccgtacgctacgattctcccgaatttgccggcctcagcggcagcgtacaatacgcgcttaacgacaatgcaggcagacataacagcgaatcttaccacgccggcttcaactacaaaaacggtggcttcttcgtgcaatatggcggtgcctataaaagacatcatcaagtgcaagagggcttgaatattgagaaataccagattcaccgtttggtcagcggttacgacaatgatgccctgtacgcttccgtagccgtacagcaacaagacgcgaaactgactgatgcttccaattcgcacaactctcaaaccgaagttgccgctaccttggcataccgcttcggcaacgtaacgccccgagtttcttacgcccacggcttcaaaggtttggttgatgatgcagacataggcaacgaatacgaccaagtggttgtcggtgcggaatacgacttctccaaacgcacttctgccttggtttctgccggttggttgcaagaaggcaaaggcgaaaacaaattcgtagcgactgccggcggtgtcggtctgcgccacaaattctaatctgcaaagattggtatcaacaaaaagcctgtcgccagacaggcttttttctgtttggctttttcctgttttctgtttggctttttcctgttttctgtttcgctgttttctgtttcgctgttttctgtttcgctgttttctgtttcgctgttttctgtttcgctgttttctgtttcgctgttttctgtttggcttttttctgtttggcttttttctgtttggctttttcctgtttttagtcttttttattcaatgtcaaaatatgccgtcattcccgcgcaggcgggaatctagtgcgttgagtttcagctatttagaataaattttgaaactttaatcccgtcattcccacgaaagtgggaatccaggacgcaaaatctcaagaaaccgttttacccgataagtttccgcaccgacagacctagattcccgcctgcgcgggaatgacgggatttgaggttgcggcatttatcgggagcaacagaatccgctctgccgtcattcccacgaaagtgggaatctagttcgttcggtttcgcttgttttaagtttcgggtaacttccacttcgtcattcccgcgcaggcgggaatccagtgcgttgagtttcagctatttagaataaattttgaaactttaatcccgtcattcccacgaaagtgggaatctagttttttgagtttcagtcattcccgataaattgccttagcattgaatgtctagattcccgcctgcgcgggaatgacggcggaaagattctatttttcccgataatcgcccacaatctcaaattccttcattctctcaaaaacaaaatcagaatcctaaatcccatcatccccatctatgtgaatataaaaattttaaaaattatagtggattaacaaaaaccagtacggcgttgcctcgccttagctcaaagagaacgattctctaaggtgctgaagcaccaagtgaatcggttccgtactatctgtactgtctgcggcttcgtcgccttgtcctgatttttgttaatccactatattttcacaagcgaaagaatgccgtctgaagccttttttccggttttcagacggcattttttgcttgacgtttaactgtaaatcttcgcgccttttttgacgaactcgaccgctttttcctccatgccctgccgttgggctttttgcttgtcggcgtagtcgcgcacttcctgcgtgattttcatcgagcagaatttggggccgcacatcgagcagaagtgggcgattttcgcgccttcggcaggcagggtttcgtcgtggaagctctcggcacgttcagggtcgaggcttaagcgaaattggtcgcgccagcggaactcgaaacgcgctttgctcagggcgttgtcacgtaattgtgcgcccggccagcctttggcgagatcggcggcgtgggcggcgagtttgtaggtgatgatgccggtgcgcacgtcttctttgtcgggcagccccaaatgctctttcggggtaacgtaacaaagcatcgccgtgccgtaccagccgatattggccgcgcctatgcccgaggtgatgtggtcgtagccgggtgcgatgtcggtaacgagcgggccgagcgtgtaaaaaggtgcttcaaagcagtgttgcagctcttcggtcatgttttctttgacgcgttgcagcggcacatggccggggccttcgatcatgacttgtacgtcatgtttccacgctttatcggtcaattcgcccaaggtgtgcagttcggcgaattgggattcgtcgttggcatcggcaatgcagccggggcgcaggccgtcgccgaggctgaacgatacgtcatacgctttcataatttcgcagatttcgtcgaaatgcgtgtagaggaaattttcccgatgatgtgccaaacaccatttcgccataatcgaaccgccgcgcgagacgatgccggtgaggcggttggcggtcatcggcacataacgcagcaacacgcccgcgtgtatggtgaaatagtccacgccttgctccgcctgttcgatgagggtgtcgcggaacaaatcccaagtcaaatcttcggcgatgccgccggttttttccaacgcttggtaaatcggcacggtgccgatggggacgggcgcgttgcggataatccattcgcgcgtttcatggatgtgcgcgccggtggacaaatccataatcgtgtccgcgccccaacgcagcgaccacaccattttttcgacttcttcggtcaggctggaggtgacggcggagttgcccaagttgccgttgattttgacacgaaagttgcggccgataatcatcggttcgagttcggggtggttgatgttggcgggaataatcgcgcgtccggcggcgatttcttggcgcacgaattcgggcgtgatttggtcgggatgggtcgggatgttcgcaccgaaactttgccccgcgtgctgttccaagagtttggcgtattccggtttttgggacaattcgtctaattttaaacgttcgcgtatggcgacaaactccatttcgggcgtgataatgccttggcgcgcgtagtgaagctgggttacgttgctgccgcttttcgcgcggcgcgggcgggtgatttggttgaaacgcagatgggcggttttcggatcgtgtgcgcgttcgatgccgtattcgctggagagcttgggcaggatttcggtatcgccgcgttcgtccagccacgcggtgcggatgtgcggcagaccttgtttcaggtcgatatgcgccgccgggtcgccgtacacgccgctggtgtcgtagacgggaatcggcggattggcttccgtaccttgcgccgtgtaggtgtcgtcctgacggatttcgcgcaaaggcacgcggatgtcgtcgcggctgccttgcagatacacgcgttccgagttcggatatttaaagcagatgccgatgtcttcgctcaagtcggcaagctcgcgcgcttcgttgccggaagttttggcggttttttttggcgtagtcataaaaaaatgctcctgttttctcgtttagaattaaagaaacaggagcgttttgcgttttcagacggcatttgaaaaccaatgccgtctgaaaagcagaatccgtgaaaactccccacgcaggtattatcccgatcgggtgtaaagggtatttctcagccgcctaaacatcaggcagcacccctgtttcaatgttaaccaaaattaaatcacgaacatgaacttttgtaaagaaaataatatttcaaatcaggcataaaccgccggacggcaaaattttatgatttttcgcggaagtaatgtttgacaacataaaaaatctgccgtatagtttcatcttctgacgcgggatggagcagcatggtagctcgtcgggctcataacccgaaggtcgtaggttcgaatcctgctcccgcaaccaaatatcaaacccctcggttcaatgccgaggggttttgttttgcctgtttcctgtttcctgtttcctgccgcctccgttttttgccggattttccttccggccgcaatatcggaacggcagaccgccgtctgtttgcggttgcaaattcaggcagtttggctacaatcttccgcattgtcttcaagaaagccaaccatgccgaccgtccgttttaccgaatccgtcagcaaacaagaccttgatgctctgttcgagtgggcaaaagcaagttacggtgcagaaagttgctggaaaacgctgtatctgaacggtctgcctttgggcaacctgtcgccggaatgggtggaacgcgtcaaaaaagactgggaggcaggctgctcggagtcttcagacggcatttttctgaatgcggacggctggcctgatatgggcggacgcttacagcacctcgccctcggttggcactgtgcggggctgttggacggctggcgcaacgagtgtttcgacctgaccgacggcggcggcaaccccttgttcacgctcgaacgcgccgctttccgtcctttcggactgctcagccgcgccgtccatctcaacggtctgaccgaatcggacggccgatggcatttctggataggcaggcgcagtccgcacaaagcagtcgatcccaacaaactcgacaatactgccgccggcggtgtttccggcggcgaaatgccgtctgaagccgtgtgtcgcgaaagcagcgaagaagccggtttggataaaacgctgcttccgctcatccgcccggtatcgcagctgcacagcctgcgctccgtcagccggggtgtacacaatgaaatcctgtatgtattcgatgccgtcctgcccgaaaccttcctgcctgaaaatcaggatggcgaagtggcgggttttgagaaaatggacatcggcggtctgttggatgccatgttgtcgggaaacatgatgcacgacgcgcaactggttacgctggacgcgttttgccgttacggtctgattgatgccgcccatccgctgtccgagtggctggacggcatacgtttataggatgcgccatgcttgaactgaacggactctgcaaacgcttcggcaataaaaccgtcgccgacaacatctgcctgactgtcgggcgcggcaaaatactcgccgttttggggcggtcgggctgcggaaaatccaccctgctgaatataattgcggggattgtccggccggacggcggggaaatatggctgaacggagaaaacattacccgtatgccgcccgaaaaacgccgtatctcgctgatgtttcaagattacgcgctgtttccccatatgagtgcgctggaaaatgcggcattcggtttgaaaatgcaaaaaatgccgaaagccgaagccgaacgcctcgccatggcggcacttgccgaagtcggactggaaaacgaggcgcaccgcaagcctgaaaaactttccggaggcgagaagcaacggctggcgttggcgcgcgctttggttgtccgcccttccctgctgctgttggacgaatcgttttccagtttggacacgcatttgcgcggcacgctgcgccgtatgactgccgaacgtatccgaaacggcggcatccctgccgttttggtaacgcattcgcccgaagaagcctgtacgacggcagacgaaatcgccgtgatgcataaagggaggattctacaatacggtacgcccgaaacattggtcaaaacaccatcctgcgtgcaggtcgcccgactgatgggtttgcccaataccgacgataaccgccatattccgcaacatgcggtgcgtttcgaccaagacggcatggagtgccgcgtattatcccgtacctgtttgcccgaatcgttcagcctgtccgtcctccatccggaacacggcatcctgtggctgaacctcgatatgcggcacgccggggcggtatcgggcaaggatacggtacgcatccatatcgaagaacgggaaatcgtccgcttccgctgatgcttcttaaaaacaaaatgccgtctgaaaacctttcagacggcatttttttaccaaagcagccatatttttttatcagggctgcaaaattttatccgaaacaacaacaatcttttcatcgtcattcccgcgcaggcgggaatctagaacgtaaaatctaaagaaaccgtttttcccgataagtttccgtgccgacagacctagattcccgcctgcgcgggaatgacggattttaggtttctgattttggttttctgtttttgagggaatgacgagacttgagatggcggcatttatcgggagcaactgaaaccaccctgccgtcattcccgcaaaagcgggaatctagaacccaacacggcaaaaatttatccgaagcgacaacaatcttttcatcgtcattcccgcgcaggcgggaatccagaacgtaaaatctaaagaaaccgtttttcccgacaagtttctgtgccgacagacctagattcccgcctgcgcgggaatgacgggattttaggtttctgattttggttttctgtttttgagggaatgacgagacttgagatggcggcatttatcgggagcaactgaaaccaccctgccgtcattcccgcaaaagcgggaatctagaacccaacgcggcaaaaatttatccgaagcgacaacaatctgagacctttgcaaaattcctttccctcacaacagccgaaacccaaacacaggttttcgtctattttcgccccaaatacctcctaattctacccaaatacccccttaatcctccccggatacccgataatcaggcatccggtcgccttttaggcggcagcgggcgcacttagcctgttggcggctttcaacaggttcaaacacatcgccttcagatggctttgcgcactcactttaatcagtccgaaataggctgcccgggcgtagcggaatttacggtgcagcgtaccgaagctctgttcgaccacataacgggtcttcgacaaatatcggttgcgtttggtttgcgcctccgtcagcggacggttgcggcaggctttgcgcataatatagtggattaaatttaaaccagtacggcgttgcctcgccttgccgtactatctgtactgtctgcggcttcgtcgccttgtcctgatttaaatttaatctactataatgtgcagtttctcgatatagccttccgcatcggtgcgggtatgttgtttgtaaccgagtttgtagaggccgtttttcttgatccaacgcgcatcgctgtccttactccgtgtggtttggccgctgacttgtccttcttcatcgacttctatggcctgacgctgtttgccgtcggcggtctgaataatggtggcgtcaatgacggcggcggatgctttctctacttttaaacctttttcggtcagttggcggttgatcagtttgagcaattcggacagggtgtcgtcttgcgccagccagttgcggtagcggcataaggtgctgtaatcggggatgctcagttcgtcgaaacggcaaaacaggttgaagtcgatgcgggtaatgaggctgtgttcgagttcgggatcggagaggctgtgccattgtccgagcaggacggctttgaacatggacagcagcggataggcgggacggccgcggtggtctcgaaggtaacgggttttttgacggttcaggtattgttcgatcggctgccaatcaatcacttgatccaacttcaatagcgggaagcggttgatgtgtttggcaatcatggcttgtgcggtttgctggaagaaggtgctcatggaaaatctcctaaatgtcttggtgggaatttaggggattttgcaaagttttcaacaagtttccgcaccgacaaacctagattcccgcctgcgcgggaatgacgggattttaggtttctgatttcggttttctgttttaagggaatgacgagacttgagatggcggcatttatcgggagcaacagaaaccactctgccgtcattcccgcgaaagcgggaatctagaacccaacgcgacaaaaatttatccgaagcgacaacaatcttttcatcgtcattcccgcgcaggcgggaatctagaacgtaaaatctaaagaaaccgtttttcccgacaagtttctgtgccgacagacctagattcccgcctgcgcgggaatgacgggattttaggtttctgatttcggttttctgttttaagggaatgacgagacttgagatggcggcatttatcgagagcaactgaaaccactctgccgtcattcccgcgaaagcgggaatctagaacccaacacggcaaaaatttatccgaagcgacaacaatcttttcatcgtcattcccgcgcaggcgggaatctagaacgtaaaatctaaagaaaccgtttttcccgataagtttccgtgccgacaaacctagattcccgcctgcgcgggaatgacggattttaggtttctgattttggttttctgtttttgagggaatggccgattttgggtttctgtttcggttttctattttgcaagaatggcaaaatttcagattgcgggcattgttaagtatttctattttttacctgccgtatttatttccgccccttgaagtcggcttcttcctcgacagacacgctgttcatctgtttgatcagcttttccgacttctcttcgtcttcgcagcggatgactttcacaatatcactttcgagctgtccgacattgctgtgcagaatgatgtttttgacgggcaggatgttgttggggttcatggaaaaacggcgcagccccatacccaataaaacgcgggtaaacgcggtatcgcccgccatctcgccgcatacggatacgtctttgtccatgcggttggcggtacggatgacgtgttgcagcattttcagcacggcgggatggccgggctggtagaggtggctgacgctgtcgtcgccgcgatcgacggacaagatgtattgaatcaggtcgttggtaccgacggagatgaaatcgaccagtttcaaaatactgccgacggtcagcgcggcagacggaatttcaatcatacagccgatgccgactttaccgaaggcatcgccgcgttcggcaagctggcgttgcgcggtgtcgaggtggatgaggcactggcgcacttcggatacggaggtaatcatcggccacatcatccgcacggggccgtgtaccgccgcacggaggatggcgcgcatctgggtgcggaacatgaccggttcggcaaggcacaggcggatgccggtcatgcccagcgcggggttgaggctgccgttgggcgtgctgtttttcccgaaccagcgcgggtttttgtccacacctaaatcgactgtccgtatcgttacgcttttgcctttcatttttttgacaatcgcgctgtacacttcgtactgctcgtcttcagacggcatcgtatcgcggttcaggtaaagaaactcgctgcggaacagcccgatgccgtctgcgccgaggttgtgcagcggtttcacgtcttcggcggattctatattgcccacaagctcgatgcagaccccgtcggcggtggcggcggcggtttttttgagcttgttcaaatcgcgtttgtggctgcggtattcgcgggcacggcggcggtattcgttcaacaccgactcatccggcgcgataatcaacacgccgttgataccgtccacaatgaccgtttcgccttcggtaatcagtttgcgcgcgttgtgcagcccgacgacggacgggatgtccaagctcctgcccaaaatcgccgtatgcccggtggggccgccggcatcggtaacgaaggcggcaatgcgctgctctttaaacaaaaccgtgtcggcgggcgaaaggtcgtttgcaatcagaacggtttcgtcaaacaggttgtcggcaacttccaactcgttgccctgcccgatcaggttgttgtggatgcggcggacgacttgcagcatatcctgcttgcgttcgcgcaaataggcatcgtccatattgtcgaattgggcggcgagtttgtcgctctgctgcttcaatgcccactcggcgttgattttttgttcccttaaaatatcgacgggttcgcgcgacaaggtaacatcggtcaagagcatcaggtgtagcgagatgaacgcgcccaactcggtcggggcgttttcgggaatcgcgctgcggagctgttccaactctttgcgcgtggctttgacggcggcatcgaaacgttcggcttcggcatcggtgtccgcctccgcaacatcatactgcggcacttcctccgtaccgcgcgcaatcaggtgggcgcaaccgacggcaatgcctttgcccgccgccacgccgtgcagcacgatactcattattcgccctcgccgaagtagccgttgattaagtcggtcagggcgcgcatcgcttccgcctcgtccgcgccgtccgtctccagttcgatgaccgtacccttggcggcggcgagcatcatcagccccataatgcttttgccgttgacgcggctgtcgtttttcgtaacccagacttcgcttttgaattgggacgcggtttgggtgaacttgttggacgcgcgggcgtggagtccgagtttgttgatgatttcgatggattgtttgagcatttcgattcccgtgttatgtatatcggcagcagacgccgtttaaaatgttttcctgccctgccgcttcttcagacggcatcgccgctgcgccggcacaccaaatcttcgggcgcggacgtgatggcgaaaatgccttttaccgccgcctccctgacgcattcggtaaaggcggcaaggtcttccgccgccggcgaatattggacggccttaaccatcatcggcgcgttcagcccggtcaaaatcgccgatttgttttcgcgcacgaggcggcgggcggcattgcagggggtcgcaccgaaaatatcggtcataatcagcacgccgtcgttgtcgggaaattcctgaagcgcggcaatggcgttgttgttgatgtcgtcttggtcttccgtcggctgcacgccgagtatgcggacgttttcaggcagtccgcccggaaaaaaatgatgcgccagcttgcggtaggcttcgcctatggtttcgtgtgtgatgattaaaagccctatcatattatgcgtcctgttcctcattatcctgccggcgtatgggcgcgatgccgtctgaacagccttcagacggcatcgcgcccttattttccgcccaatgcgtaaatctcgcccagattgcgccagcagcccgccgcatccatgccgtaaccgaaaacataacggttcggcacatccagtccgacataatcggctcggataggcttgggtttgtcaatcagcttgttggcgaacaccgccgcacggcagcttgccgcacccatttccaaaagtttggcttgaatggcggacatcgtatgcccttcgtccaaaatatcgtccagcacgacgacgtgcctgccccggatttgttccgcatcgggcatacgcttccagttgaacgcgccgccctccagcttgtcgccgtaacgggaaacgtgaacataatcaaaatctaagggaaaacgcaacagcggcagcaactgccccgtaaacaccaccgcgccgcccatcacgggcagcagcagcggatatttgccgcccaaatcacgcgtaatctcgtccgccactttttgcagtgcggcacggcattggccttggtcgaacaaaagatcggcgttttcaagcatcgcctgtgtttcaaggcgtttggtttctaaatcggtcatatgtcggaatcggtcggtaaaaggaaaattataaaccaaagtatcggatgccgtctgaactgtcctgctcagcggtcggtacgcacgcgcacaaatgtggcaaatttcggcgtgcctttccgcgtaaagccacggtaacggtaggtaatcagtgtgccgattttgggcgggttgtcgcggtctttatctttgaaaccgctgccgatgcggaattcgccgtgccggtttttgcagccgaccgcgcccagccgtccggcgtttcgccctttgccctcatagtgccgcgttaccgtgcattcgtcgtcgtattggcttttcagcttcaataattggctgctcctgccgccgctgtaacgggattcgggctgacgcagcatcacgccttcgccgccctgcgcttcgatttgttttaaaaagtccatcgcgtgctgccggtcgcgcactttgatttgcgggatgatggtaatcggcgcgttcggatgcgttttcagccactgcgttgcgactgccaaacgttggtagaggttgccctgcgccttgggtacatcgaaaacgtgcaggcggatgccgcgccagtctgaagaaacagaacgcacggtagcggaaatctgctcgaactgaccacgtccgctatacaattcgccgtccaaaggataaggcggaaactgagcggtaaaacctttgggcggagcaaacgcgtagccctgacggctcatcaggtgctttccgtcccaataggcgcgcacgccgtcgagtttctcgctcatcgcccagccggcaatatcctgccctttgtattcctgcgccagcatcaaatccgccgcgcctgctgatgcagggatgaaaaccgccgtaaaaatcggtatgatgccgccgattgtcttcttaatcatctgattcccccaatatcaaaacgggcggcaaaccgccataaaacaaacggcaaacccgatgccgtctgaaaaaccgtttaggaacacgccgatgaccctacgttacgaaatcttccccgttacccccttccgccaaaactgcaccctgatttgggacgacgaaagcggcgaagccgtcctgaccgatgtcggcggcgacgtgccgttcctgctgcaagcgttggcaaaccgcaaacttacgctcacggcaatctggctgacgcacggccatctcgatcacgcgggcggcgtggtcgaaatgttgaaaacgcataaagtccctgtcctcgggccgcatccggacgatgaattcctgctccaatcgctgccgcaaaccaccgcgcaatacggatttcccgtctcgcccgcctttgcgccgaaccgttggctcgaagaaggcgaaacgctcacggtcggacgctatgcctttcaagtgctgcatattccgggccatacgccgggacatatcgtcttttattgtgccgaggcggaattgctgattgcgggcgacgtgctgttttacgaaaccataggcagaaccgattttccgcgcggcaaccacgccgacttaatcaataatatccgcaacaaattattcacccttcccgaaaccgtgcaagttgtcgccggacacgggcgtatgacttccatcggacacgaaaagcggcacaatccgtttttctaaccgccttccctacggtcttcagacggcatcatctgcactgatgccgtctgaaacacaaaaggctcagacaaccgccgccttgccggtgtacctcgccggacaaggctttggtaagtacttcaaacaaacccaaaatcagaaccagtacagttacgccgcgctttcggcattcccgccccggctgaaacaatatttttccgcacaagtcagactgcttcatcttctgccgcgtattccaaagattccgacaacgccgttgtttcattggaacgctcgaccaaatcccgttgaagttgtttgcctgccttcacgcccaacagacgcagtttctcggcgcgtccgaccagattcccgcgcccttcggcaagttgcttgaatgccgtctgaaaactgctttgcgcctgatcgatgcctttgccgacgctttcgagcgtctgtacgaagccgacaaacttgtcgtacagcttgccgccttcgtccgcaatcgccagtgcgttctgattttgctgttcgttgcgccaaatattcgccaccgtcctcaaagtcgccagcagcgtactggggccgaccagcataatccgtttgtcgaaacactcttggaacaagcccgcgtcattctgcaacgccaacaggtaggccggttcgacagggataaacataaagacgaaatccaatgtgttcacaccttccaaatcggtgtaatccttcagcgacaagcctttcatgtgtgcacggatgctggcaacgtgtgccgccagttcgcgtgccgccgtatccgcatccgccgcctgcgtgtagcgcacataagctgtcagcgagaccttggaatcaatcacaatctgcttgttgtcgggcaggttgaccaaaacgtcgggctggaggcggcgcgtgccgccgtcttcctcttttcggacggatgccgcctgaaccacatattcccgccctttctgaaggccggaattttccaaaaccgtttccagaatcatctcgccccaattgccctgaaccttattctgcgtaccggtcagcgcgttggtcagggcctttgcctcgctgtgcagctgcgcgttcaacccctgaagccgtttcaattcgttttccaacgtcagccgctcgcgcgattctttatcataggtttgcttgaccaactcgccgaaaccgtggatgcgttcgtttagcgggttcaaaacctgatggagctgctcgcggttctgctcggtaaaacggcggcttttttcttccaaaatcgtgttggcaagattttgaaactgatcgctcaaacttttgcgcgcctcgcccagcaaggacagcttctcttcagaagcaaggcgttcctgttcgatttgcgttgccaaacgttcgttttcaaccgccaaaccctgtgccttttcctgcaactcggtatgcgactgcctcaaccgctccgcttccgcctctttttcctgcaaatgggcaatctgtttttcggctgcggcaaaacggttgccgacatcggaaaggtcgttttgcacgtcgcggacagtttggcggctttcttccaaatcggtttcgattctttggcggatttggcgttccaaggcatattggtcggcaaacgccttccgttcctgtccgagctgcgttgccaaacgttcgttttcaaccgccaaaccctgtgccttttcctgcaactcgatatacgactgcttcagccgcgccgactccgcctctttttcctgcaaatgggcaatctgcttttcggctgcggaaaaacggttgcccaaagcataattttcgtcctgcaaatgccggtatttcccgtccaacaccgccaattccgacacggttttgccgtgtgcctgttcgacaaaatcacatcttgccgccttttccgccaggtgcgcgttcaaaccggcaaactcgccctgaaaccggcccttcatcagcaaccatgtaaacaacacgcccgacaccaacgccgccaaaggcagcaaaacagtcatcagttccatcaattatcctaatattcaaacattttcacaccggacaaaaccgccgcttattccgattctacctgtttgttcgacatagctccaaaaaatatagcggattggctttaaacctgttcgacatcgccttaccatgctgcttgcggtttcagaccttttcctaattcaatatcaatctgccacaaaccctgattaagttcccgatgtctgacatttttagaatgatgccgtctgaaatgttgcagctatgttcagacggcatacggattcaggcttttcaaacggcaggcaaaatgaaaaaagggcaaaccctaaaggatttgcccttttgttccaaacgcttagtgtacgtctttccaatattctttatttaggaagtaagccaaaggcagcataaccgcaaataggaaaatcatcacgacatagcctatacgtttgcgttgcagttgtgcaggttcgcccatgtacacaaggtaattgaccaaatcgcgtacatatgcgtcgtactctttttggatcactttgccgttaggcaggcggcggctgtgcaaaccggtagattcccaatacagcttaggcttcatctcgccgtgttcgtcttttaccataaccggctgacctttggcatccaactcaacggcttgaacaccttgttgctcccacaacgggtggggcataccgactttatcgaatacagtattgttccagccgctcggacgggtcggatctttatagaagccgcgcatataggcgtaaaggtagtctgcacctttggaacgcgcaatcaacgtcaaatcgggcggagcagcaccaaaccattttgccgcatctttcgggttcatcgccgaatgcatgacatcgccgacattatcggtggtaaacatcaggtttttcttgatttcttcgtcagtcaaaccgatgtctttcagacggttgaagcgcataccgcttgcagagtggcaagacaaacagtagtttgtaaagatttgcgcaccgtgctgcaggctgacttggtcacgcaggtcgatatcgactttttcgtagtgtccgccgccgctggcgacggctgcactcataggcactgccagcaataaggcagcaaaccagtttttcagagtttgtttcattttcgctgccctcatcagatattggttgcaaacaagtaagcaccaacaacggtaataccgacgtaaacaaagaacataattttttgtttagtagtgctcatggttacgcgttcaggaactggtttgttggtatccagtttggtatagaacggcatacccaggaagaatgcaaagtagacgaaagacaggatacgtgcaaccaaagtacgcgtatcagttgctaccattgcacccaaaatacccaaaccgatgaaggcaatgatgaacagaaccaatgcggttttgaagattgggccgcgatagcggacagatttaacctcgcctttatccaaccaaggcagcaaggcgatcagtacaactgctgcacccataccgattacaccccatacctgagtaccggcaaaggaaggaatcgcacgcagaattgcgtagaacggagtgaagtaccataccggcgcaatgtgcggaggtgttttcagcgcattcgctgcatcgaagtttggcgcttccaagaagtagccgccgccttcaggtgcaaagaacatcacggcacagaagacaatcaagaatatcgttactgccaatatatcatgcacaacataatacggaaaaaaaggtatgccatctagagggacaccgttttcatctttcagctttttgatttctacaccgtcagggttgttggaacccacttcatgcaaggcaatgatatgagccacaaccaagccgagcaataccaaaggtacagcgataacgtgcagggcgaagaatcggttcaaagtaacatcggaaacgttgaagtcaccgcggatccaagtggacaaatcaggaccgataacagggatggcggagaacaggttaataattacctgcgcaccccagaaggacatttgaccccaaggcagcaggtagcccataaaggcttctgccatcaatgccaagaaaatcagggaaccgaaaatccacaccaattcgcgcggttttttgtacgaaccgtaaatcagaccacggaacatgtgcagataaacgacgatgaagaagaaagatgcgccggtagagtgcatatagcggataatccagccgccggacacgtcgcgcatgatgtactctactgcggtaaaggcagcaggcagatggtaggcgttaaggttgccgtccggtttgtagttcatggtcaggaaaataccgctgacgatttgaatcaccagcaccagcatagacaatgagccgaagaaataccagaagttgaagtttttaggcgcatagtattcagacagatgctctttccacattttacttaatggaaaacgggcatctacccagcctaacaatgcttttgctttgctattggtttggtttgccataattatcgttccttattcttagtcttcgcccaccaagatagttgtgtcgctcaagtatttatatggcgggacaaccaggttggtcggggcaggaacacctttatatacgcggccggccaagtcgaatttcgaaccgtggcaggggcagaagaagccgcctttccagtctgcacccaaatcggcgggggcaatgtcgggacggaaggtgggcgagcagcccaaatgggtgcagataccgatggcgacaaggatgttcggcttaatcgaacgggtctcgtttttagcatactccggctgctgttccgcatcggaattgggatcggtaagttcgccgttcaggcctttcaggtctttaagctgctgatctgtacggttgagcacccaaatcggtttgccttgccactcggcggtcagcagctgacccgcttcgattttactgacatccacctcgacggcagcaccggcggccttggctttttccgaagggaaaaaactggccacaaacggcgttgccacacccaatgctgccactccgcccgcgccgcaggtcgcgagtgtcaggaaacggcggcggccgttgttgatttcttgattatccattattcagtcgtcctaatattttgggaataccgagccattaaacgttgcaattttacccagtttgcagtgatactcaaagcattatttaaaataaggtaaagttttatgatatttctcaagactcaagccggattgttttcgtcaaaatggcacacttccaacccgaaaacctctgccgccgattctgccagcgcgcgtacgccgtaacgttccgtcgcgtgatgccctgccgaaatgaaagccgtacccgtttcattggcaaggtggtattgggcttcagagatttcccccgtcaaatacagatcgacaccttcgtctattgccgtctgaaaaaacccctgcgccccgccgctgcaccatgcaacccgtcggatttcgcgttcgggattgccgataacgacaggcttacgttgcaaaactgtttcaatatgcgccgccaatgcgccgagtgtcttggcttgtttcaggctgcccgagttgagcaggttttgttcgccgaaccgtttttctgtcgcaaaacccaatctgtcggcgagttgggcattgttgcccagtgtgggatgtgcatccaggggcagatggtagcctgccatattgatgtcgtgccgtaacagtgcggcaatccgttcttttttccaaccagtaacggtcggcaactcgtttttccagaacataccgtgatgtaccaaaagcaaatctgccttctgctccacagcaaaatcaatcgctgccctgcttgccgttaccgacgtaacgattttcccgatatattccctcccttcaacctgcaaaccgttaggggcgtaatctttaaacaacgctgtctgcaatgtttcattacaccaagtcagaaaatccctgcacaataccatcttttttcctaatcgctttaaacaagcgggcattctaatcgcaaaatgtccggaattcacatttttccgatttgcacccgcatatgaattattttaatatgcgccggttcaatatgccgtctgaagccccatggattccattatcgaattgcgccacctcaaaaccctgctggcacttgaagaaaccggcagcgtctcccttgccgccaaacgggttttccttacccaatccgccctttcccaccagatccgtatgctcgaaaaccactacggcacgccgctgttcgaacgcaaatccacgcccttgcgctttaccccggtgggcgaaaggctgctgcgcctcgcccacgaacttatacctcaagttgctgttgcagaatgggatttggcgcgaatcacggaaggagaggcgggagagctgcggattgccgtcgaatgccatacctgtttcgactggctgatgcccgccatgggcgaattccgcccgatgtggccccaagtcgaattggatatcgtatcgggattccaagcggatcccgtcggactgctgctgcaacaccgtgccgaccttgccattgtttccgaagcggaaaaacaaaacggtatttctttccaaccgctgtttgcctacgaaatggtcggcatttgcgcaccagaccatccgcttgccgccaaaaacgtttggacggcggaagactttatcggggaaaccctgattacttatcccgttcccgacgagatgctggatttgcccaaaaaaatcctgattccgaaaaacatcaacccgccgcgccgacacagcgagctgaccatcgccattatccaactggttgccagcagacgtggcattgccgcccttccctattggacagtcatgccctaccttgaaaaaggctatgtcgtccaccgccaaattactgccgacggactgcaaagcaaactgtatgccgccatccgtaccgaagatacggacaagagctatctgaacaatttttgccaaatcatacgcgaacgcggttttgcagatttgcccggactgagcgaactggaaccggtctgaccccttattcaaccatacccggcagtttttctattttttcatgtatagtggattaacaaaaaccagtacggcgttgcctcgccttgccatactatttgtactgtctgcggcttcgtcgccttgtcctgatttttgttaatccactatactgtttttgatttttgcccaatctgtaatctttagattgccaatgggaaaccgtctactacaaataaaaaaccctgcgataagcagggttttttgaatttccaacattaacgtttggagaattgttttgcacggcgtgctttgcgcagacccggttttttacgttcgacttcgcgggcatcgcgggtaacaaaaccagcttgagacaaggcgggtttcaacgcggcatcgaagtcgatcagggcacgggtaatgccgtggcggattgcgccggactggccggtttcgccgccgccaacaacattgactttgatgtcgaaagattcggcgttttcagtcagaaccaagggttggcgaacaaccattcggctggtttcccgtgcgaagaattcgtcaacgggacgaccgtttacgatgatttgacctgtacctttaatcaggaatacacgagccactgaacttttgcggcggcctgtgccgtagtagtatttaccgttcatgtcgcgtccttatttcagttccaaaactttgggttgttgcgcagcatgggcgtgttccgcacccgcatacactttcagttttttaatcatggcgtaacccagaggacctttgggcagcataccttttacagcttgttccaaagcgcggcccgggaattgctcttgcatttcgcggaaggtgcgttcgtagataccgcctgggaaaccggaatggcggaagtattttttatcttcgaatttggcaccggttacacgcagtttgtccgcattgataacaatgatgtaatcgccggtatcgacgtggggggtgtattcaggtttgtgtttgccacgcagacggctggcgacttcggccgcaacgcgacccaagactttgtcttgggcatcgatgacgaaccattcgcgcttcacctcgtggggtttcgctgaaaaggttttcatagtggaaatccagatagatatagaaagttgtaaattttaaagacaggattcgattttgtcaatcgcattaccgcgttacggaaggattttccggatttcggcagactgcatactgctttttcgggcggggcggcggccaatgtgaaaaaccgcatcgttgcgatgcggttttgaatgggaatccccgcgagagccgtttcggccgaatccgcttgaaccttgctgacaaggcggctgcctcgggtagtttcgggtgcgtccgcaaaaggacgctcgcgcccactactgctcccggcaaccttaagcgaacttattggttcaaaggaatatatgccttcgcggacaccgcagggaaaaaggggttattcctgcgccaagcgggatagtgctttttggcaggcgttgtccatatcggctattttacgcgcaaaatcgccgattgccaaatcgccgccgttcagggaggttttcaacaggtcgtggacgacgttgagcgcggccataatgacgattttttcgctgtccgcgacgcgtccgccttcgcggatggcttcggctttgccgttgagcattccgactgcctgcaacagtgtgtctttttcttctgccggcgtgttgacggtcagccgggcgtgcatgacttcgatgtggacttgttcgatgttcatcctttaatccttattgctgcgtttcctgccattgggggaggcgcgctgccagtgcgctgattttttccctgctctgttcgagcaggctgcggtatcgtgtattttcttctgtcaggctgtcaattttgttttgcaggtcttctttgagtttgccgacttggacgagcagggcttcgctgagttcgtcgacggcggtttcgtgttcgagtttttgccgctcgtgcgcccgtttgagttcggcgacggtttctttgaggcggcggttttcgctgacgagggtttcgaatttttgtaccaacgtataaacgctgctttcgagtttttcgatattttgtttcataaccttacctgtccgtatgccgtctgaaggcttcagacggcatctgtctgttgtttattcaaaacgcgcgctgcgttccatcagtctttcgacaacctgttgcggggtcatttctttgcggatgagttgcagcagagtttgggtaatcggcatgtcgatttggtacttacaggcagtattgaagacttcttctatcgtgctgaccccttcggaaacgtgtccgatttcgaccagcacctgatgcagttccttgccttctgccaaacccaagccgacgcggcggttgcgcgaaagtgcgccggtgcaggtgaggatgaggtcgccgatgcctgccagccccatcatggttttgggctgtgcgcccattgcggaggcaaggcgggtgatttcagctaatccgcgcgtaaccagtgcggcacgggcgttaagcccgtactctaggccgtcggacaatccggtggcaatcgccataacattttttaccgcgccgccaaccgccacgccgataacatcggtactgccgtaaagcctcatgacggtcgtgttgagctgcggtacgagttcttcaatccactcttggttttcggaggcaaggacgacggcgcagggcagttgtttggcgagttcctgtgcaaaactcgggccggaaagtacgccgattttcttattgtcgggcaatacttctttcaagacttgaaaggtcagcagcccggtatcctgctcgaatcctttgcaggcggcgaggacggggaggtgtcccgcgccgtactgtttgagcagctctgcgctgcttctcaatccggcaacggaggttacgataaggacaagtccgctgtctttgagcgcgtctgccaaatccgcacacacttccaaggtttcgggaaaggaaaagccgggcagtccgcgtttgttttcacgcgcttcctgcatttgacggacttggtctgcgttgcgcgtccacagggatacgcggttgccgtgttgggaaaaatgcagggcgagcgccgtaccccacgaacctgcgccgataacggtaattttcattggtcgtctttcaacatatcactgccgttcactttaaaacaatcggtgtttctctgcaagtgcggtcagggaaatgccgtctgaaaggcgttcagacggcattttgccccgatgcggcactatcagcctgtattgcgcaaaccttgcgccacgccgttgatggtcaggtgcaccatcagaagggcgtgcggattgtcgggttctttacgcaggcgtttgagcatggcgacttgcaaaccgttgagcgcgttcaggtagggaatcctcaaagcgagcgaacgggcgaggctgcggttgtcgcgcaaaagctcttcggtttgcagtaggtcgagcagtgctttgcggctgcggcggtattcttccttaatcatcccgaagatgatttttgccttatcgggcgattcgctcaagccggcatagttttccgcgagggtgatgtcggttttcgccatcacttgttccatattggagagcatggcttggaagaacgggttgctttgggcgtgttcgcgcagggcggcgagcgtttcgggtttgtcttcgcacaaggtttccaccgcgctgccgaaaccgtaccaagccggcagcatgaggcggttctgcatccaggaaaatacccacggaatcgcgcgcaagtcctgaatccgcgccaaggttttgcggctggcgggacggctgcctaggttgagggtggcgatttcctgaatcgggctggtttgcagaaagtagtcgatgaagtcgggatgggtaatcagttcgcggtagtatttgaacgatacgtccgacaatgcctgcatcagtttggcatcagggtcttttttatccggcaggatgctggcttccaaagtcgcggcaaccaaggtttccaagttgcgttgggcattgccggggtcggcgtatttggcggtaatgacttcgccttgttcggtgatgcggatttgtcccgccacgctgcccgccggttgggcgagaatggcttggtaagaagggccgccgccgcgacctacgctgccgccgcgtccgtggaacaggcgcatacggacatcgtattttttgaagagttcgaccaagcccaattccgcctgatagaggcaccatgagctggtaacgtagccgccgtccttgttggagtcggaatagccgagcatgatttcttggatgtttccacggctttcgagcagtgcatcgtaccagtcgaggcggaacatggtttccatgaccggacaggcgttttccaacgcttcaatggtttcaaacagcggcacgatattgatgcggctgtgcggtttgccgttttccaccgccaacaggccggtttctttcagcagcaatgccaaggcgagcaggtcgctgggttgttcgcagttggaaataatgctttgtgttacggcatcttcgccaaattcgtctttgattttgcgcgcttcgttgaaaattgccagttcgtggcgggtatggtcgctgtatgtgataaacgggctgtacagaggacgttgatggctcaattcgcgcaacagggcggtttgtttttgctcttcgttcaggcggttgtagtcttccaagcctgcgtgttggaaaagctcggcaaccacatcggcgtgtttgcctgcgtgttggcgcaagtcgagcggcatcatgtgaaagccgaacacggatacggaacggatgaggtctgccaaacggccttcggcaagcagacggctgccgttgtcgataagggaacgttgcaattttttcaaatcatccagaaactcttgtgccgaagcataaggctcgagaaagccgaatttgcagcccatacccaaaccgagcgcgcgcgctttgcccatagcgcgcgccataatgtaggcgatggcgcggcggtagggttcttcggcgcgggcgatttcttcgtcgggcgatttgtcggacaacgccgttacatcgccgttgactttgacgcggcggatggagagcggcagttcgcggtagagtttgtcgagttcgccgcgatagaagcggaacacggcatcggcgtggcggcggaaggcaaagcgcagggtttcggcagaaacaaacggattgccgtcgcggtcgccgccgatccagccgccgattttgaggatgtccggaacgcggacgccgggataggccgtctgaaagtcgtgttccatcttgcggtagagcttgggcagggcttcgaaaaagctcatcgggaagatggacacgccgttgttgatttcgtcgttgacgctgagtttgtggcggcgcgtttcgctggtctgccacaagcccagcaggatagtgtcgatttcgcggcgcagccgtgccagcgcgtcggcattggtgcagcgttcgcgttgcggcaacagtgcgcggatgcggcggttgaagcttaagacggtttggcgttgcacttcggtcgggtgcgcggtcaaaacggcggtaacggacgtattgtccaactgccgctgcaccgatttgccgtcggctttccccgctttgagcctgcggacggtttccgtcaggctgccttccgcgccgccgcgtccggcttcttcgtggatttggcggcggcgttcgtggtgcacgtcttcggcgatgttcaaaatctgggcgaacaggccgcaggccaaggttaaatcgtgggtttgttgttcgtccaattgcggcaatactttttcaatcaatgccgcgctgtcgtcggaagtggacaagagtttgactgtttcgacaaccaacggcgaggcttcttcgtgcaggaggttgaacagggattgtttcagaaattccgcgtccgccgccaaagccgcgtcctttggattgttcagaatatgcagttgcatgatttttctctctcgtctgccgtaaatattgtaaatgtaccccaaatgccgcatccgtgccaaaccgttcacactttaaccgcccgtgtcccgaaatgccgtctgaagttgaacgccgcccgacggcagcgttacaatcgcccgcaactgtttttttccgaacatcatcatgaccacgaccgaacacgacaacgacgatgcattcctgctgcggtacagccgccacatcctcttggacgaaatcggcatcgaagggcagcagaaactttccgccgcgcatattttggtcgtcggctgcggcggtttgggtgccgccgcactgccctaccttgccgcttcgggtgtcggcacgctgaccatagccgattccgacacggtcgaactgcacaacctgcaacgccaagtcgcatttgacgagggcgatgtcggcaaactcaaaaccgaagccttggcaggccgcctgaaacgcatcaaccataccgtcaacgtccgcgccgtcaacgaaaaactcgacggctgccgcctgaccggtttggttcaagccgccgacatcgttttagactgttgcgacaactacgccacgcggcaagccgtcaaccgtgcctgcgtgcaaacgaaaacaccgctggtttcaggggcggcggtacgctttgaagggcaacttgccgtgtaccgtcccgacttgcccgactcgccgtgttacgcctgcctgtttgacggcggatcggcttcagacggcatctgttctctcttcggcgtgttctcgccgctggtcggcatcatcggcagtacccaagcggcggaggctctgaaaatcctgctggatgcgggcgaaccgtcgcacggcaggctggcggtttaccgtgccttggaagggggctggcaatatttcgacctgccgcgcaaccctgaatgcccggtttgcggcacagcgcgataaaccctgccgccgtttcagacggcatccaaacggatgcggcggaacggttttaaaaatttaaaaatttacatttctttgcaaaaaaaaaaaaaaaaaaataaacttaccttataattgcaattgttttagcaatgtctgtttcgcagactcattgagtaaaacgttttccccgtaatgtgtttggccgtctgtcccctttgggttcggacggcttttttttggctgtgtttgaatacccggttggttttatctgtttgcagcgggggaagccgcttatttccgttcgggcggaaaacggttccatcggataaaaggcattttgtccgactgattaaagttatagtggattaacaaaaaccagtacagcgttggctcgccttagctcaaagagaacgattctctaaggtgctgaagcaccaagtgaatcggttccgtactatttgtactgtctgcggcttcgtcgccttgtcctgatttttgttaatccactatatatcttaggtttgcatcggcggaatattcaaacacagccttttttaaggaaatccggatacggcggcgcatcaataatgcggcggaatctcgtcgcgcagggaatacggctcttgcgcgtcgggattcctgtcctgcattttttgatacagcagcctcaactgagcctgctgcaaatccagcgtctgccgcaattccgccaccatcgcgttcaggccggcgattacgtcctcctgaagcgcggattggatttccagttcgacaatacggcgttccaactcttgaaccgcgtccatttacagcaccatcgcggcaatccagccggcaatcagcagcgggatgttgtagtggatgaaggtcgggataacggaatcgcggatgtggtcgtgctgcccgtcggcgttcagccccatcgtcgggcccagcgtggaatcggacgcaggcgaaccggcatcgcccaacgcccccgccgtgccgacaatggcgacggtggcaagcggcgaaaaacccaaaccgacacacaaaggcacataaatcgcggcaataatcggcaaagtggaaaaggacgaaccgatgcccatcgttaccaaaagccccaccaccagcatcgccaatgccgccatacctttgctgttgccgaatatcgccatactgctttccaccagcggctgaatatgcccggtcgcattcatcacggcggcaaaaccctgcgcggcaatcataatgaagccgaccatcgccatcatcttgataccttcgccgaatacgtcgtttgccttgtcgcggttaatgacccccaacatcataaatacggcgaaaccgagcatcgcgcccaacaccagcgagtcttcatacatcaactggatggcaaagcatacggcaatggcgacggcggcggccaggctgcggtaggcggacggctgcggacggtttgccgcatcggcgttgcccgccgtatcggcattgttgctttggtacaggcgcggtttgcggtaatggacaaacgccagcaggagtccggccagcattcccaacgcgggaatcgccattgccgccatcacgttaatgtttttcacatcaagctgcggcgcggcggaatggatgttgcccaacaggatttcgttcaaaaaaatcgcgccgaagccgtaaggcaggaacatataagtcgtaaccagcccgaaagtgatgacgcacgcaatcaggcggcggtcgattttcaggcggttgaacaccaaaagcagcggcggaacaatcatcgggataaaggcaatgtggatggggatgatgttctgactcatcatgcccatcacaaggatgatggaaagcagcagccatttgaccgcgccctcgcccgaacgcacgctgtcgggcataccgccccggttcagcttgcggacgaccgcgccggcaagctgctgcggcaggccggaatgggtaatcgccattgcaaacgcgccgagcatcgcataagaaagcgcaatcttcgcaccgccttccaaacctttgttgaacacggggataatccccgcctgactgacctgtcccgccgcatcggcaatgttttgcagcggcatacccgccaccgcgccgccgacaaacgcgccgaccgtcaggctcaataccacgtgcacgcgcgacagcgacagcaccagcataacgattacggcaactacgactgcattcattgtttatcgctccaaacctataaatgtttacatatcgaaacacatcataacccaataacgggaaacccgccaattttgcaaacaattatttcaaatgcttcatatacttccccagcgtaaccctgtccaaacccgccaaatccggcagggtttccactcctgaaaaaccattctccgccaacacgccgcgcaccgccgcgccctgatcgaaaccgtgttccagcaataaaaaaccgccttccgccaaacggtcgggcgcgccttgcgccaaggtgcggatgcagcttaggccgtctgaaaagtcggtcagcgcgatttgcggctcaaaccgcaaatcgccttgcaacaaatgtttatcgccgttttcgatatagggcgggttggacacgatgatgtcccatttcccttcagacggcatatcggtgtcgaaccacgaaccgtgtgcaaattcgacccgcgcgcccaaatccgccgcatttttccgcgccgtttcaagggcgggcgggctgatgtcggatgcgcgcacaaacgcatcggggcgttcgagcgcgacggttacggcaaccgcgccgctgcccgtccccaaatcccacacgcgcccgttttcgggcaggcgcgccaatacggcttcgaccaaatgttcggtttcggggcgcggaatcagcacgctcggattgactgtaaagcgtctgccataaaattcgcgcacacctaaaatataggcaaccggctcgccgttcagacggcgttgcgccagcctgtccgcccgctgtcggacttcgtccggcatttcttccccgccccgcgtcaacaactgcacgcgcgtatattccgaaacatattgtagcagcattcttgcttcatttttaggcagttttgacaagcccaaccatttatcaaacgtcatttttatcccgtctgccgctgatgcggcttttctttccttattctttccggcaaacgtaccgatggtggcaaccgcaaatgcggcataccacaaataaaatcctgcaccgtagcgcacaatatccgatgtattccctgcttcatcgacgtatacggctttcacactgaaagccaccaacgccaagccccaaagtgccgcatggacaggcacgaccttcttccgcaacgccagcaaaacaatggccgccaaccaaacataattcgcatagaccgcacaatacctgatatccaaagaagcaaatatcgaccccaaaatcaaaacggtcaaaccctccatgcttccatgattgcccaaataaaatgcaacattggataaagacgctatccacagggcaaccgacaccagcaacatcactatgggaaaacttggtttccgattctgttcctgcatggttttatcctaatgtaaaaggccgcctgaaaacctttcagacggcatcgtgccggattccgcgtcagattgcgctgccgccgacggtcagtccggcatcaatccgcaaagtcggttgccccacgccgacggggacgctctgcccttctttgccgcacacgccgacaccgctgtcgagcgcagtatcgttgcctatcatggaaacgtgtttcagcacttcggggccgttgccgatgatggtcgcgcctttgacgggatattgcagcctgccgccttccacccaccacgcttcggacgcactgaacacgaacttgccgctggtaatgtccacttgtccgccgccaaagttgacggcgtaaatgcccttgtcgatggacgcgatgatttcttccggctcatagctgccgttttccataaaggtattggtcatgcgcggcataggggcggaagcgtaactttcgcggcggccgttgccggtggactgcgtacccgtcaggcgggcattggtttcgtcctgcatatagccgactaaaatgccgtcttcaatcaatacggtgcggcgggtttcgttgccttcgtcgtcgatgttgagcgaaccgcgccggccggcaatatcaccctgatcgacgacggtaacgcctttggcggcgacgcgctcgcctattctgccggaaaagacgctggttcccttgcggttgaaatcgccttccaaaccgtgtccgaccgcttcgtgcagcaacacgcccggccagccgttgcccaaaacgacggtcatttcgccggcgggcgcggggcgggattcgaggttggtgagtgcctgtttgacggcggcatcgacaaaccgatgaaccaagttttcatcgaaataagccaagtcgtagcgtccgccgccgcccgcgctgccctgttcgcggcgttcgccctgtttggcgataacggtaacgttcaggcgcaccatcgggcggatgtcggcggcgtgtttgccgtccagacgggcgaggtaaaccatatcgtattcgcaggtcaaaccggccatcacttgcacgatgcgcggatcggcggctttggcgattgcttccactttgttcaacagcgcgactttggcggcggaatcgaggccggcaatggggtcggacgcggaacaaaccggcttgccgcgcgtttcagacggcattttggcggacaccttgccgcctgccgccccaatcgcgcggacggcgcgggcggaacggtttatcgaatcgatgcacaggctgtcggcgtaggcaaaggcggttttgtcgcccgaaacggcgcgcacgcccacgccctgattgatttggaagctgcccgatttgacgatgccctcttccaaatgccagctttcataagcggtgcgctggcagtagatgtcggcgtaatcgacgtggtgcgcgccgatgatgcacaggcttttggcgagcagttcgggggaaaggcggttggcttcgagcagccgcgcctgtacggcggaataggtcggatgcatagtgtcggcgcataaaaaatcaggggcttgattatacggcatttgttatatagtggattaacaaaaaacagtacggtgttgcctcgccttgccgtactatttgtactgtctgcggcttcgtcgccttgtcctgatttttgttaatccactatagaaatgcgccgtgccgcctgaaatgtaagatttttgccaacgccccctgcttttgtgtacacttaaagctccttgtcggagtgccgccgccgggcggctgagattgcgaaagcagaatccgtagaacctgtcggggtaatgcctgcgtaggaaacaaaccgtcaaatgccttatcaggcttccgttcccttttccgcacttccccgccccattttcatgttttttaaggacttgatatgtcgggcaatgcctcctctccttcatcttcctccgccatcgggctgatttggttcggcgcggcggtatcgattgccgaaatcagcacgggtacgctgcttgcgcctttgggctggcagcgcggtctggcggctctacttttgggtcatgccgtcggcggcgcgctgttttttgcggcggcgtatatcggcgcactgaccggacgcagctcgatggaaagcgtgcgcctgtcgttcggcaaacgcggttcagtgctgttttccgtggcgaatatgctgcaactggccggctggacggcggtgatgatttacgccggcgcaacggtcagctccgctttgggcaaagtgttgtgggacggcgaatcttttgtctggtgggcattggcaaacggcgcgctgattgtgctgtggctggttttcggcgcacgcaaaacaggcgggctgaaaaccgtttcgatgctgctgatgctgttggcggttctgtggctgagtgccgaagtcttttccacggcaggcagcaccgccgcacaggtttcagacggcatgagtttcggaacggcagtcgagctgtccgccgtgatgccgctttcctggctgccgcttgccgccgactacacgcgccacgcgcgccgcccgtttgcggcaaccctgacggcaacgctcgcctacacgctgaccggctgctggatgtatgccttgggtttggcagcggcgttgttcaccggagaaaccgacgtggcaaaaatcctgctgggcgcaggtttgggtgcggcaggcattttggcggtcgtcctctccaccgttaccacaacgtttctcgatgcctattccgccggcgcgagtgcgaacaacatttccgcgcgttttgcggaaacacccgtcgctgtcggcgttaccctgatcggcacggtacttgccgtcatgctgcccgttaccgaatatgaaaacttcctgctgcttatcggctcggtatttgcgccgatggcggcggttttgattgccgactttttcgtcttgaaacggcgtgaggagattgaaggctttgactttgccggactggttctgtggcttgcgggcttcatcctctaccgcttcctgctctcgtccggctgggaaagcagcatcggtctgaccgcccccgtaatgtctgccgttgccattgccaccgtatcggtacgccttttctttaaaaaaacccaatctttacaaaggaacccgtcatgacccgtatcgccatcctcggcggcggcctctcgggaaggctgaccgcgttgcagcttgcagaacaaggttatcagattgcacttttcgataaaggctgccgccggggcgaacacgccgccgcctatgttgccgccgccatgctcgcgcctgcggcggaagcggtcgaagccacgcccgaagtggtcaggctgggcaggcagagcatcccgctttggcgcggcatccgatgccgtctgaacacgcacacgatgatgcaggaaaacggcagcctgattgtgtggcacgggcaggacaagccattatccagcgagttcgtccgccatctcaaacgcggcggcgtagcggatgacgaaatcgtccgttggcgcgccgacgacatcgccgaacgcgaaccgcaactcggcggacgtttttcagacggcatctacctgccgaccgaaggccagctcgacgggcggcaaatattgtctgcacttgccgacgctttggacgaactgaacgtcccctgccattgggaacacgaatgcgtccccgaaggcctgcaagcccaatacgactggctgatcgactgccgcggctacggcgcaaaaaccgcgtggaaccaatcccccgagcacaccagcaccctgcgcggcatacgcggcgaagtggcgcgggtttacacacccgaaatcacgctcaaccgccccgtgcgtctgctccatccgcgttatccgctctacatcgccccgaaagaaaaccacgtcttcgtcatcggcgcgacccaaatcgaaagcgaaagccaagcccccgccagcgtgcgttcagggttggaactcttgtccgcactctatgccatccaccccgccttcggcgaagccgacatcctcgaaatcgccaccggcctgcgccccacgctcaaccaccacaaccccgaaatccgttacaaccgcgcccgacgcctgattgaaatcaacggccttttccgccacggtttcatgatctcccccgccgtaaccgccgccgccgccagattggcagtggcactgtttgacggaaaagacgcgcccgaacgcgataaagaaagcggtttggcgtatatccgaagacaagattaaagccgcccgaaaggacaccttatgaccttcccgcccctaaaatccccgctcaaattctacgccgtcgtccccaccgccgattgggtggggcgcatggtcaaagcaggtgccgacacggtgcaactgcgctgcaaggccctgcacggcgatgaattgaaacgcgaaatcgcccgctgcgccgcagcctgtcagggcagccgtacgcagcttttcatcaacgaccactggcgcgaagcaatcgaagcgggcgcgtacggcgtgcatctcggacaagaagacatggacaccgccgaccttgccgccatcgccgccgccggtttgcgcttgggtttgagtacgcactccgttgccgaactcgaccgcgccctgtccgtacaccctagctacatcgccagcggcgcgattttcccgaccacgaccaaacaaatgcccaccgccccgcaaggcttggacaaactgcgcgaatacgtcaaacaagcaggcggcacgcccgtcgtcgccatcggcggtatcgacttgaacaacgcccgagccgtactcgccaccggcgtttcctcactcgccgccgtccgcgccgtaaccgaagcggcaaatcccgaagcggtggttaaagcgtttcaggctttgtgggatggataaaaccgaaagaagaaaattcaattgccgtgtaggcaaaacttagcccgttatcgcaaacatacttaactttaaatgtggcatatcatcaaattccgtcattcccgcgtaagcgggaatccgccttaaaacttgagaaaccatcatttgaaaaacagtttccgaatttcaaaaatggattcccgcccgtgcgggaatgacggcaaccggtcagttgcgtatcaaaaaataaagtaattcggctagatatagtggattaacaaaaatcaggacaaggcgacgaagccgcagacagtacaaatagtacggaaccgattcacttggtgcttcagcaccttagagaatcgttctctttgagctaaggcgaggcaacaccgtactggtttttgttaatccactataaatacagaaacatcgagaaaccatgaacatcatcttaaacggcggacccgccgaacttcacggcacgaccgttgccgacctcatcgcccaaaccgcgccgcaaaagccctttgccgtggcggtcaacaccgttttcgtccccaaaggcgcgtatgcggaaacggttttaaacgaaaacgacaaaatcgatatcgtgcggccggtggtcggcggctaggcggttttgccttttcagacgacccctgtccccaaaacaacgttatggtggattaactttaaatcaggacaaggcgacgaagccgcagacagtacggatagtacggaaccgattcacttagtgcttcagcaccttagagaatcgttttctttgagctaaggcgaggcaacgccgtactggtttttgttaatccactatacaaaggaacccattatgctcaccctatacggcgaaactttcccctcgcggctgctgctcggcacggctgcctacccgacccccgaaatcctcaaacaatccatccaaaccgcccagcctgcgatgattaccgtctcgctgcgccgcgcgggaagcggcggcgaggcgcacggtcaggggttttggtcgctgcttcaagaaaccggcgttcccgtcctgccgaacacggcaggctgccaaagcgtgcaggaagcggtaacgacggcgcaaatggcgcgcgaagtgtttgaaaccgattggataaaattggaactcatcggagatgacgacaccttgcagccggatgtgttccagcttgtcgaagcggcggaaatcctgattaaagacggcttcaaagtgctgccttattgcaccgaagacctgattgcctgccgccgcctgctcgacgcgggctgtcaggcgttgatgccgtgggcggccccgatcggcacgggtttgggcgcggttcacgcctacgcgttgaacgtcctgcgcgaacgcctgcccgacacgccgctgattatcgacgcgggcttgggtttgccctcacaggcggcacaagtgatggaatggggctttgacggcgtgcttttgaatactgccgtttcccgcagcggcgatccggtcaatatggcacgcgccttcgcactcgccgtcgaatccggacggctggcatttgaagccggaccggtcgaagcacgcgacaaagcgcaagccagcacgccgacagtcggacaaccgttttggcattcggcggaatattgaaaaaggcagcaaaaatgccgtctgaaggcttcagacggcatcgcggtccaaaacggcggcggcctgaaacggacaaaccgccattccccggcatcacggctttgtcggaaaaaatggaaaaaccggccggaaaaccttgccgcccgtcccgatgccgcaaccaacgaaacactcggcctccacggtgtgcaggctgccgcgcaagccctaaatacggcaatagaagaagcgttttgttgttgtttgaatacacttaaaaatacctaaagccgtccgtaagccttcatccgcaacggttttaccgctttcgcatccccgaatccacgctcaaacacccccgaatgacaaccctgtccgcgccaaatcggacggatgttcaaacacgggcaaccttatttccgtcaggcacgaagccctcagctatgcctgccgaccccgatttgtccgacacaatgaaagtttgccgacccgaatcacaaacatcggcggacaggttaatttgtttatttttcatcgtattacaaaaaatctgcatttatttttaaatttttattgataattattattattagcgtataatcaaaaccactcggaagccgtccgttccgaaccattaaacaccatatttccccatcatcactttcacacttggagtcggcatatacgagacatacattccctttttatatatcagatactcaaaaccgaaacgccaaacccaccttcgcggtgggtttggcgtttatcgtccggctttcgcgcctatttgcaagacttgaggttcagtttgccgtatagggacgtgattttacgaatttcgtccgcatcggcggcattcacgccggtaaacaaaaccgtcatacgcgacacgctcaaagaatcgtcctgcctgtcggcttcggcaaagtgttcgacaatatgcgccccgccgaatccggcgccggcaagccggttttgcagggcttgggcgttttcccggctgttgccgacacccaaactcaatgcgccgtcaaacggtatggggttgaaacctttggcagacagctccgccgcctgattttcggcatcggcggaaacgggcaggacgacgcggtaggttttgtcggcaggtttggcttgggcggtgcgtttttcgacgctcctgctggcaacgtgcgaccatttgcccaaaagtcctttgatgcggtggtagtcatcttcgtccatcgtgaggcttgcctgcgcggcgcataaggcatccgccgcgccgttttcgcgttccgcctgcgccttttcggcggcgagtttttcgcggcgggctttttcttcacgctgttttttctctttcagttttttctgttccgcttcttttttcaagcgcaactgctccgcctgttcttcgctcagaatgtcgccctgtttgagcagtgcgcctgtatccgattcagatgccgcctgaacgacaggaccggatgctggaatattccgaacaaccggcatagttggggcaactggttgaacctgcaaattgtttgcggcattctgtgcctccggtattctgccggcctgtttcagtgtcagtttgtaacctaccgtaccgccgaatacggcaatattaatcgcaaccaaaaggataaatagccatttcatctctgtattccttaaatatgttcatattccctgccttcggcggcaatcatgttcaacaacccgtaaatgacgaggttgtccgccacgcgcacggtattttccgccaaaaatgcaggcggcagggcttcggcaacttttgccgcgccgccgccggtaatgatgacatcgacaggcttgcccgccccggttttttctttcaaacgcccgtgcatcatcataaccgagccgcaaaccgcatccatcatgccgctggcgacggcattgcccgttgtggtcgggaaaggataacgcttaccggcgtgccggttgaggttggcggttcggacggcgagcgattctttcatcaggtggaaaccgggcatgatggttcccccgagataatgtccgtcatcggtgagcgcgtcaaccgttaccgccgtgccgcaactgacgacgacgcaggcgttgcggctgaagcggcggctgcccaaggcgttgaaccagcggtcggaaccgtgttcttcggggtggcggtagtggttgcgtatgcccaaagcctgtgcggaagacggcagccactcgatttttcgggcgagctgttcctgcacttgtgcctttttgaattctccgcacacagcgcaaccgacgatgcggacatttccatccgccttttccgcccactccgcgcccaaaggcgacaaatcgcggtacggcgcgctaccgacggttgcgaacgtgccgttttccacccacgcccacttgagccggctgttgccgccgtccaacagcagaaaacgttccgaatcccgccgcttcggcacggaaaccggcctgtcgtcggaccgcaggctgatttcgccgctgacgaccgtctgtttgccctctgccgtttccaagtgcaaaacgccttgtccgtccacgcctttaaccgtgccttcgaacacggtttcgccgtcgcgcaacagcaataccgccttgccgtggtcgcggttggcagcctgatattccgccacaaaaggcgcaaatccgtcccgcgcatattgcaacaacaccgcgtccagttccaccaacagcgtttccagcagcacggcggcatcggcattgccccgccgcgatgccgtctgaaacagcgattgcacggaagcggcattttctacttccttgggcaggacaaaattgatgccgataccgaccacggcaaccgttttgccgcccgtcctgaccgtttcaatcagaatgccgcccaatttgtcgcgtccgacaaccaaatcattgggccacttaatctgcacatccaaacctaaacgcgacaaggcgcgccgacacgccactgccgcaacaggcgacagcgaacccaactcatactgcggccggtcaaacacccagccaaaactgaacatcagacactcgcccaaacggtgcgaccacttccgcccctgccgccccctgcccttactttgcaggtgggtcacgcatatggttttgtgcgccttgtccggcgcaatccgcgccaattccagtatctcgtcgttgctggacgcgcactcgtgcttcaatgccgtctgaaaacccgacctttcccccagctcgcgcaaaccttcggcatcgaaaaccgccaatgggcgcaccagccgccaatagccgtcgtgttggcgcaacagcccgcgtatgtgcgccggcatctgctgccaaaaaccgttgagctgctgcggcttcatatccgccatacgcgccagttgcgagacgtgttgcggcaaaccgtcggcaagctccgccaacacccgccagtgcgaaagcttcaaaaccgtcattttccgccctctgccgcacggatttttgccaaagtcttcgttgtcgaagtctggtgcagaaacggaattgaaaacacctgaccgccgcgcgccaacgtttctgccgcaccgacaatcttatccgcagcccaatcgccgcccttgaccaaaatctcaggtttgaccgcctcaatcaacgccgccggcgtatccccgtcaaaccacgttaccaaatccacactttccaaagcggcggcaacggcggcacggttctccaaaggattaaccgggcggtcaccgcccttgcccagacgccgcaccgaagcatcggtattcaacgccagcaccaacgcgtcccccatcgaacgcgcctgcgccagataagtaacgtgccccctgtggaggatgtcgaaacagccgttggtaaacaccagcgggcgcggcaacaacgccaaacgcgccgccaacgcctcgggcggacagattttcgattcaaaatcagggacagaccaagcgtcaaccatcaaagcctccgacaaaaaccataaaagacagaaaaacccacatgatacagaagcatatgcgaaaggcaaagccggcggcgcggacagtacgcgcaaacgggaaaagacccgtaccgaaaagtacgggcctttatctggggtggctgatggggctcgaacccacgacaaccggaatcacaatccggggctctaccaactgagctacagccaccataaaaacggttttcaatcaaattcttggcacgcccgacaggaatcgaacctgtaacccccgacttagaaggtcggtgctctatccggttgagctacgggcgctcatgccgattcgtgctgattgattggtcggggcggtgggattcgaactcacgaccctctgctcccaaagcagatgcgctaaccgggctgcgctacgccccgacttgaagaagcgaactatacaactcagggaaagatgcgtcaacatttattttcaagacaccaagatgaaaaatatagttttttgatttgaaaaaatatttaatccgtccaaacagccgtattttatttcagggcaaatttattttcggcatcctgctgtaaaaacaaacggaaaatgcgataattttcagcattttctacctgtttaacaaaaggacggatatgtcggcacaactgatcaatggtaaagaagtttcgcaaaaacgcctgcaggcggttgccgaagcggtggcgcaacgccaacagaacaatctgcacacccttgcctggccgtggttttggtcggaggcgaccctgccagcgcggtttatgtccgcaacaagaaaactgcctgccaaaaatgcggcatcaaatcactgtcttacgagctgcccgaatcaacatcgcaggaagaactgctggcactggtcgaccgcctgaatgccgattccgaagtggacggtattctggttcagctaccgctgccgaagcacctcgacagccaggcggttttggaacgtatttcgccggataaggacgtggacggcttccatccttacaatgtcggcaggctggcggtcaaaatgccgctgatgcgcccgtgtacgcccaagggcgtgatgacgcttttggaagcttacggcattgatccgaaggggaaaaaagcggtcgtggtcggcgcgtcgaatatcgtcggccgcccgcaggctttggaactgctgctggcgcgcgcaacggtaacggtctgccacagcgcaaccgaaaatctgacagacgaggttgccggagccgatattttggtggtcggcgtaggcattccgaactttgtcaaaggcgaatggatcaaacctggcgcggtcgttattgatgtgggcatcaaccgtttggacgatggcagcctgtgcggcgacgtggaatttgaaacggcaaaagaacgggcggcgatgattacgcccgttcccggcggcgtgggtccgatgacgattgccacattgatggaaaacaccctgcacgcggcttcactgcacgatgcttgagcggttctgaagataaaaatgccgtctgaaaggctttcagacggcattttgccgtgtccgtttatttgggcagcttgacgacaaccgtatccgccagtatgtcgtaaagcgtgcggcggtcgcgtttgaccataaagagcaggacaaagttggcaaggaatgccagcaggttgatggcgttttctccgttgtcacctactgcaagaccgataacggcggcaataatggcaaccaaaaccgaccatgcgatttcgcgtaccaaaaccgtgccgacaaaaccgggattgcggccgtcggttttcaacacacggattctcatgattttcttacccaatgactgcccgtcccggctcatatagtagatttggatgacggtgtacgccaaaatgcctgccagtcctacccaaaaggaagtcatgcccaaaagcagcccgaatatttcttcgccgctgccaatcctgccttcattcttgatggcgaaagcaatcagtccggcaaacggcaccaacaaaaccaaaaaggtaaacaattggttcagcagcgcggcaagtatccggtcgcctgcaccggcaattccgacttcaatttcctgcccgttgcggttgtcggatgccgcgtcggtgtagtcgtttttttcttccatatccgttcctgataattgttcttaactgaccccgattctaccgccacgacaccgaaaacgccaatacttaaagaaatcccgataaagaactttacattttcccaatacggcgttaaaacgcttcctttacgccatacataattttattaacgatttttcctcaaggagcaacacaatgaaagtaggtttcgtcggctggcgcggtatggtcggttcggttttgatgcagcgtatgaaagaagaaaacgacttcgcccacattcctgaagcgtttttctttaccacttccaacgtcggcggcgcagcccctgatttcggtcaggcggctaaaacattattagatgccaacaatgttgccgaactcgccaaaatggacatcatcgttacctgccaaggcggcgattacaccaaatccgtcttccaagccctgcgcgacagcggctggaacggctactggattgacgcggcgtcctcactgcgcatgaaagacgacgcgattatcgtcctcgaccctgtcaaccgcgatgtcctcgacaacggtctcaaaaacggcgtgaaaaactacattggcggcaactgcaccgtttccctgatgctgatggctttgggcggcctgttccaaaacgatttggtcgaatgggcaaccagcatgacctaccaagccgcttccggcgcgggcgcgaaaaacatgcgcgaactcatcagcggtatgggcgcggttcacgcccaagtggcggacgcgcttgccgatcctgccggctcgattctcgacatcgaccgcaaagtatccgatttcctgcgcagcgaagactatccgaaagccaacttcggcgtaccgctcgccggcagcctgattccgtggattgacgtggatttgggcaacggccagtccaaagaagaatggaaaggcggcgtggaaaccaacaaaatcctcggccgcagcgacaatccaaccgtgattgacggcctgtgcgtccgcgtcggcgcgatgcgctgccacagccaagccatcactctgaagttgaaaaaagacctgcctgtttccgaaatcgaaacgattttggcaggcgcgaatgactgggtgaaagtcatccccaatgaaaaagaagccagcatccacgagctgactcctgccaaagttaccggcacgctgtccgtccctgtcggacgcatccgcaaactgggcatgggcggcgaatacatcagcgcgttcaccgtcggcgaccaacttttgtggggcgctgccgaaccgctgcgccgcgtattgcgtatcgtgttgggcagcctgtgagccctgtttgaatggaaatgccgtctgaagcctgtttcagacggcattttccttgcaaccctgccggataacgccctgccggcactgccgacgtaaaaaataaaggattccatttccggcggtatgcggcagcccgactttatccgaacctgatgcgcctgcacgtcaatgaaaacagcccgattgcggacttcctgctacagccgaaattccgataaggcaagcgttcacgccagcaacatttcctgcatcagcttcataccccactgccagccgccgagcatgccgttcaaactgcccgaatgcggggaaaccaacaggcgggcgttccacaaatccgcctgtttttgcgcccaaccgtgcggcacgccgccgtgttcgggtacaaccaatgcggcacggcagggacagcggacgcgttggaaagcgtgttccgcatcgtcgggaaaaatatcgggacgctgcggtacaaggatgatgttggcaattttcttccgtgtcaggatgtctgcctgatacagccacgccaaaaatgcggccgcgcccgcaccgtgtgcgacaacggcgacgtatttgccgcgtatgcgttcaaatgccgtctgaagccctgcctgccattcccctatgctttgaccggccgacgcttcggacatctgcacgacgggataactgatcgcccaacggtctatccacatctgatcctctccggcatcgcgtatcagccaaagcgtcaaatcttcgagttcaaaaccctgcataccgccccgcctatttcagcaggtcccggagggtaaaggcgatgagcagcgaagcgggtacgctcaatatggcgcagacggtcaggcaggcaaaaatattcaccacccgccgccagcctttccaacccaaacatttggacgcaatcagcaggcagggcaggcaaatcagcagccacaccaacgcccatatcgggtttgccttggtcggcgcaagccagccttgcatccgcgacaacataaatatcgcccacaccaacatgggcaggataaacgcagcgacgacccatgccgcgcctattcctgtttttccgtccacattccaatcatatttacccaaaaccttattcggcagcatagtcatactccacgaccagcggcgcatggtcagaaaatttttcatctttataaacgtgtgcggacacggctttggcagcaagttcgggcgtaaccatctgataatcgatgcgccacccgacatctttcgcatacgcctgccctcggttgctccaccaagtgtagcccggcacatcgggataaagcgtgcgccacatatccgtccaaccgagcttgtggataaccttgcctatccactcgcgctcttcaggcaggaaacctgaatttttctggttgcctttccagtttttcaggtcgatgttttggtgggcgatgttccagtcgccgcagacgacaatgtcgcgcccttcgtttttcatcgcttcgagcatagggtaaaacgcatcaaggaaacggtatttcacctgctggcgttcttccgcgctgctgccgctgggcaaataaagcgagataacgctcaacctgccgaaatcgcaacgcacaaaccgcccttccctgtcgaattcttcaatgcccataccgatttgcacattgtcgggtttgcgtttgctgtacaccgccacgccgctgtaaccgcgcttctcggcgcaatgccaatgaccgtgcatcccgtgcggatttttcatatcggcagacaaatcagcctcctgcgctttgagttcctgcacgcagacaatgtccgcgcccgatgcggcgatgtattcgtaaaaaccttttttgtaggcggagcggatgccgttgacgttggcggaaatgattttaagcataataaaaataagttctcacaataaaaatgccgtctgaacaaaaaagggcaaaatgcggcacatttacccttttcgatggattttaaccgcgccgccaagtcgtgccgccggcgttgtcttccaaaatgattttgtgttcgttcagaaggtcgcggatgcggtcggattccgcccagtttttatcggcgcgcgcctgtttccgccgggcgatcaagtcttcgatttcttcgttggagagaccgtctgaagccgcgccgccttgcaggaactcggtcggatcgcgttgcagcagtccgatgatgccgcccaaggctttcagacggcctgccagttgcgcgtcattggttttgttcacttcgccggcaagttcgaacaacaccgccaccgctttcaccgtatcaaaatcatcattcatcgcaacataaaagcggcgcgtgtagtcatcgccggcttcagacggcatcggatcggcgggcggcgtatttttcaaagtcgtatacaaacgcgtcaacgcgccttttgcatcatccaaatgcgcgtcggaatagttcaacgggctgcggtagtgggcgcgcaggatgaagaagcgcacgacttccggatcgtattgtttcaacacttcgcggatggtgaagaagttgcccagcgatttggacatcttttcgccgtccacgcggataaagccgttgtgcagccagtatttgacgtggctggcgatgctttgcccgtggtgggtttgcgcgtgatgatgaccgcaggtatgccccgtcgcgccgacgctttgggcaatttcgttttcgtggtgcggaaactgcaaatccgcgccgccgccgtggatgtcgaaggtatcgccgaacaggttttcactcatggcagagcattcaatgtgccaacccggacggccgttgccccacgggctttcccacgccggttcgcctgctttggcggctttccacaacacaaaatcaagcggatcgcgtttgaaaccgtccacttccacgcgttcgcccgcacgcaggtcgtccaacgatttgcccgacaattgtccgtaagcggcaaactcgcgcacggcgtagtaaacgtcgccatttgcggcaggatatgccttgccgttttgaatcagggtttcaatcatggcaatcatttgcggaatgttttccgttgccttcggctcaatatccggacgcaacacgcccaaagcatcggcatcttcgtgcatggcttggatgaaacgcgcagtcagtttgccgatggtctcgccgttttcagccgcgcgggcaatgattttatcgtcgatgtcggtgatgttgcgtacataagtgagcggatagccgcactcgcgcaaccaacgggcaatcatgtcgaacaccaccatcacgcgggcgtgtcccaaatggcagtaatcgtaaacggtcataccgcagacgtacatacgcacgttttcagggtcgatgggggaaaagggttctttttgacgggttagggtgttgtagatggtggtcatgggattatggattaatctttgttgctcggatgataatttctgttctgttcctgtagatacggaccaaggaacattacgtagttgcggattattaatatggctgatatttgtgaaaattggttctgcataacagtttgcaaaattttttgtaaattctgataatttaaacttatcttttaataagtttgctaaatctgatgacgagggataaagtttacttcttatactaggcatttcaatatgaaggactatttttatttcgttacaatctaaagccaagcgagaaaaatctttttcttcctgtttttctgctttaaatttagcagaaaccaatcctgccaatgaatctcgaatttttcttgcgattaaatatggtaggtcagaaagtttttcatctattgattgggcatttggctcaagcccaagtcggtaataatctttaatttcgattagccaaagtgtcgattcatgaagggctattatatctacacctgagctgccattatcgtcatctacactttgatttatcccgttctttcccttttcatttgtatcaattttattacgtaaattacaactgttctgaaaaattttataatgttcccattcgtcatacttggtaacgtaataatcttcaggaaaagcaaaggttaatctcttttctgtgattgtagtcatagcttaacctcaaatattcagatacctgtctgcctgcataatgttttcatctaacaatatcaatgtgttcaaatcattaatactgttcccttgctccacttttgttccatcatcggaagcaatcaacgagaaaaaacgtacaggtaaatccgtgttattttcaagcttcaaaagttccaattctctcaataagaataaagagtgtgttgcaataaaaacctgaataccctgttgagataaagaccaaataatacgggcagccactttgatcaatttaggattcagattagcttccggttcatcccaaaatagatagcctttatccagcaatgcccctgttgcgattaaccgggcaatcatgacaaatttccgcaaaccctctgctaccaaaggtgcttcaatcttaccgcccgtatttgtcagcgatagataaaaccttccttgttcttcagatacttttccgcccatcgcgttctcaataggttcgagcaattctcgaatttttgtttctctggggcctttggcaagcgggtgatttaattgcatacaggtatcaaaccaagtttcttcgaaagggatgctttggttttgatacaaagaagtgaaccaagggcaaagtgtaattaattcgcggctgggtaagaagataggtgtcggagtatattcattttctttcaatccgatgctttgaacattgacttgcgatgatgagttactggaaaaattcagactactatgcgtagtgccgttttgcagttttaaaacgatttccgtacgcccgcgcccctgcaaacgtttgctcaacctacccaaggaatcgggacggaaaacattcagtaatttatcggcaaaacttttttgcaattctgttttcagtaatctgtttttggtgttagatgttacttctagcaggctgtataaaatttttaacaaatgtgttttgccacaaccgttttcggcaacaataacattgagattttcagaaaattcaaaagtatcgtttggaagaacggtaaagtttgtcaactcaagcgactggatatattggttagatgacatttttaatccatttcaatcttgctttaaaattgtttcaaacaaccttttgtagaacaaatatcgtctgaaaccctttcttttttcactccggcttaaacacgcctgtatccgttttaggctgctgttcgataatttcaacatttgccgctgctttctccgcttctgctttttcagcttcgatacgttttttctcggtcaggtattggttgatttggtgtaccaattcctgcgtgccttggtgggtcagcgcactgatttggaagaggcgcggggtttccatgtcaaattggaaacggtcgtcgggtttggggtagtcccagccgacggcttcgaggaaggcggcagtgcgcgtttgggcttcttcttcgtcaagcatatcgagtttgttcagtaccagccagcgcggtttgccgtagagttcttcgtcgtatttgcgtaattcgttgatgatggcgagtgcttcttcggcggggttgacggtttcgtcgaagggcgccaaatcgacgacgtgcagcagcaggccggtacgtgataagtgtttgaggaaacgatggccgaggcctgcgccttctgccgcgccttcaatcaggccggggatgtcggccatcacgaagctgtggttttcgtcgatgcgtaccacgcctaagtttggatgcagggtggtgaaggggtagttggcgattttggggcgtgcggcggatacggcggtaatcagggtggatttgccggcgttgggcatacccaataagccgacatcggcgaggactttaagttcgagttgcagggaacgggcttcgccttcttcgccgggggtggattgtttcggggcgcggttgacggacgatttgaagtggatgttgcccaagccgcctttgccgcctttggcgaggcagacgcgctgtccgtgataagtgaggtcggcaacggtttcgccggtgtcgaggtcgcggataagggtgccgacgggcattttgaggacgatgtcgtccgcacctgcgccgtaacggtcggaaccgtggcctttttcgccgtttttggcttggtagcgtttaacgaagcggtattcgacgagggtgttggtgttttcgtcggcttctgcccagacgctgccgcctttgccgccgtcgccgccgtccgggccgccgcgcggtacgaatttttcgcggcggaaactggttgcgccattaccgcctttgcctgcggcgacttcgatttttgcttcgtcgatgaatttcattcaatgctcttgtttgttggtttcaaatggggggttcagacggattaccgtgtgttttgatgccgtccgaacagaatttcggacgctattataagggataagcggtatttcaacacgccgtacccaaactatttgttccgcccatcttaatgaatttttaagcaaatcttcagcctgcaaacaaaattatgtccaacttctttggtacaatcgcgcctttttgacattccgacccgacggaatgtccgttcaaaccgttacatataataagttttttatgaacacaaaccaacctgccgtttacgacccgttgacacgcgcgctgcactggctgaccgttgccggcttcatcggcattctgaccaccattgtcctgtggacgatttatagtggattaacaaaaatcaggacaaggcgacgaagccgcagacagtacaaatagtacggcaaggcgaggcaacgccgtactggtttttgttaatccactatacgaagaggcggaatgggtgggcagcctgttcggcctgcacaaatctttcggtttccttacgctgacggtgattacattgcgcatcgtgtgggcggttgccaaccgcgccaagcgtccgcaaagcgactgcaaggctgcggcggcaggccacggcattctgtatctgctcatgcttgctgttcccgttatcggcatgatccgccaatacggcagcggccgcggcccgttgaaagtgttcggcgttgaagtgatgcaagggttcgccggaaaaaatcgagtggatggcaaacttgggcaacacgttccacggcaatttgggcttgctgctgtttgccgccgtcgccggacacgtcgccatggtcgtcgcccaccgtgttcagggtagagatgttctgtgccgcatgacgggtcgtgtccgctgattccgttcacactatggtgccggctcgtccggcactatttgtttttccaagacagagccagatcgtacaaagctttctttccctcgcccgtgattttggcagcaagctccgccgcctgtttggtcggcagctcggctgtgaggattttcatgatgttttgcgcggactcggacaagccttcgtgtttttcatcctgcgccggataaagcaccaacaccatctcgccgcgcgattggttgccgtcggcagacaatgccgtctgaatttccccaaccgtgccgcttaagaacgtttcaaacgttttcgtaatttcgcgcgccagcattaatcggcgttcggggaacagttccgccatatcggcaagcgtcgcaccgatgcggtgcggcgtttcaaacatgacgataggaaacgccgcccgcacccatttggcaaacagtttcctgcgttctcccgatttcggcggtacaaaaccgttgaaataaaaatcggatccttccacaccggccacgctcaaagccgccatcaccgcgcttgcgcccacgacgggaacgactttaaacccggcctcacgcacgcggcgggcgagtttcgcgcccgggtcgcacacggccggcgtacccgcatcggaaacctgtgccacaaccatgccgtctgaaagatagccgacaatcttgtccgccatctgccgttcgttgtgttcgcgcacactgacgagtttgccctgaatgccgtacgcgctcaaaagctgtgcggtaacgcgcgtgtcttcggcacagatgatgtccgccttttgcaataccgccaaagcgcgcagggtaatgtccgccaaattgccgatgggcgtggcaaccacgtataatgtccctccgacgacgctgtcggaggctttctgcaaatgtttctgaaacataagaatgccgtctgaaaaacaaacattataaaggttaaaccgattatgcgcctaaaccacaaacagggcgaggcaggggaagatgccgcgcttgccttcctccaatcccaaggctgcacgctgcttgcccgcaactggcactgcgcctacggcgaaatcgacctgattgtcaaaaacggcggcatgattctgtttgttgaagtaaaataccgcaaaaatcggcaattcggcggtgtcgcatacagcatttccccatccaaattattgaaactgcaacgaagtgtagagtattatctgcaacagaacaggttgacaaacgtaccgtgccgcctcgatgcggtacttatcgaaggcagccgcccgcccgagtggatacagaatattacaggttgacgatatgacgacattacaagaacgcgttgccgcccattttgccgaaagcatccgtgccaagcaggaagccggaaaagtattggtcgagccgaccgtacaggctgccgagctgatgctgcaatgcctgatgaatgacggcaaaatcctggcctgcggcaacggcggttcggctgccgacgcgcaacacttcgccgccgaaatgaccggccgttttgaaaaagaacgcatggaactcgccgctgtcgcgctgacaacagacacttccgcgctgacagccatcggcaacgactacggtttcgaccacgtattcagcaaacaggtgcgcgcgctcggacgtgcaggcgatgtattggtcggcatttccacctccggcaattccgccaacgtcatcgaagccgtcaaagccgcacacgaacgcgatatgcacgtcatcgccttgaccggccgcgacggcggcaaaatcgccgccatactcaaagacaccgacgttttgctcaacgttccccatccgcgcaccgcccgtattcaagaaaaccacatcctgctgatacacgccatgtgcgactgtatcgactccgtactgctggaaggaatgtaacccttttcagacggcatggcgcaaagcaatgccgtctgaaacgcccaagaaaggaagcacccgatgaaacccaaaccgcacaccgtccgcaccctgattgccgccattttcagccttgcccttagcggctgcgtcagcgcagtaatcggaagcgccgccgtcggcgcgaaatccgccgtcgaccgccgaaccaccggcgcgcaaaccgacgacaacgttatggcgttgcgtatcgaaaccaccgcccgttcctatctgcgccaaaacaaccaaaccaaaggctacacgccccaaatctccgtcgtcggctacaaccgccacctgctgctgctcggacaagtcgccaccgaaggcgaaaaacagttcgtcggtcagattgcacgttccgaacaggccgccgaaggcgtgtacaactatattaccgtcgcctccctgccgcgcactgccggcgacatcgccggcgacacttggaacacatccaaagtccgcgccacgctgttgggcatcagccccgccacacaggcgcgcgtcaaaatcgttacctacggcaacgtaacctacgttatgggcatcctcacccccgaagaacaggcgcagattacccaaaaagtcagcaccaccgtcggcgtacaaaaagtcatcaccctctaccaaaactacgtccaacgctgactcggcaatgccgtctgaaccgccttcagacggcattgcccgacaccccaaaagcacaatcaaaatggcaaaaaaaccgaacaaacccttcaggctgacccccaaactcctgatacgcgccgtattgctcatctgtatcgccgccatcggcgcattggcaataggcatcgtcagcacattcaacccgaacggcgacaaaacccttcaagccgaaccgcaacacaccgacagcccccgcgaaaccgaattctggctgccaaacggcgtagtcggacaagatgccgcccaacccgaacaccaccacgccgcctcatccgaacccgcacagccggacggcacagacgaaagcggcagcggactgccgtcccctgccgcacccaagaaaaaccgggtcaaaccgcaacctgccgacacagctcaaaccgacaggcagccggacgacgccggaacacaagctgaaaacacactcaaagaaacccccgtactgcccacaaacgtcccccgtcccgaaccccgaaaagaaacacccgaaaaacaggcgcagcccaaagaaacgcccaaagaaaaccataccaaaccggacaccccgaaaaacacgccgcccaaaccccataaagaaattctcgacaacctcttctgacccggcacggcaggcacacccgcaatccaaggaagcattatgaacggcatcatcatcaaaacccccgaagaaatcgaaaaaatgcgcgagctgggcaaactcgtcgccgaagccctcgactacatcggacaattcgtcaaacccggcgtaaccaccgacgaaatcgacaaactcgtttacgactaccacgtcaacgtccaaggcggctatcccgcccccctgcactacggcaacccgccctaccccaaatcctgctgcacctccgtcaaccacgtcatctgccacggcattcccgacgacaagccgctcaaagaaggcgacattatcaacatcgacctcaccatcaaaaaagacggcttccacggcgactccagccgtatgtttaccgtcggcaaagtctcccccatcgcccaacgcctgatcgacgtaacccacgcctccatgatggcgggcatagaagccgtcaaacccggcgcgacactgggcgacgtaggttacgcctgccaacaggttgccgaaaacgccggctattccgtcgtacaggaattctgcggacacggcatcgggcgcggtttccacgaagccccgcaagtgttgcactacggaaaaaaaggacagggccccgttctaaaaccgggtatgatttttaccgtcgaaccgatgatcaaccaaggcaaacgccacctgcgtatcctcaacgacggctggacggtggttaccaaagaccgctccctctccgcccaatgggaacacgaagtcttggtgaccgaaaccggctacgaaatcctcaccgtcagccccgcctccggcaaaccctgaaaccggacgtatccgccccataaaaacaaacaatgccgtctgaaagaaacggcagatatgatatataatataaaaacaggcttgacccggcacattacgaaaacaaagcaaatcggaatttgccccgcaaccagacaaacttaaaggaagttttatgaaaatatttgaaaatatagaagatgttaaagccatccgtaaaaagaccgggctgaaccagatagacttctggggcaaggtcggcgttacccagtccggaggatcgcgctacgaaaccggccgcaaaatgcccaaacccgtacgcgaactgctccgcctcgtccatatcgaatgcatcgatttggcgaaagtcaacaaaaaagatatggaaatcgccgccctgttgaaaaaacaccatcccgacctgtatgccgagttgtccaaacagaccaagtccgaaagaaaaaaacaaagttaaaccgcaacctccggatgcccgacagtttttcatttccgaaaaacgcaaacaatgccgtctgaaacaccggacaggtcgccgtatcccgcctgccgcccctgcctcaaaccgccgaaccgcccgaacccgcctttttacaaactttatccaatttcctgtttatttcgggatacgccgacattagaatgtcaaacagctcgaaacgggcaaactccacatccatccaaaggaataaaaatgaaacttctgaccaccgcaatcctgtcttccgcaatcgcgctcagcagtatggctgccgccgctggcacggacaaccccactgttgcaaaaaaaaccgtcagctacgtctgccagcaaggtaaaaaagtcaaagtaacctacggcttcaacaaacagggtctgaccacatacgcttccgccgtcatcaacggcaaacgcgtgcaaatgcctgtcaatttggacaaatccgacaatgtggaaacattctacggcaaagaaggcggttatgttttgggtaccggcgtgatggatggcaaatcctaccgcaaacagcccattatgattaccgcacctgacaaccaaatcgtcttcaaagactgttccccacgttaatcaggcaacaaaaaacagcgttttcagaaatgaaaacgctgtttttttgaccgttccattattcacaaaagggaaaaaacgattacctgccccgtgtatcaaaacctgccctgccggatgaagggcataaccggcagggacggcgtcaacaccatatgggggtacggcttttcttgaaagattcggcttaaatatccaatactttcgcggtataggcgataatttcatccgccctttcagggttttcgttcaacttgatgccgtaacccggtaccagctctttcagacggtcttcccaagacggggcgcgctcggggaagcattggtgcatcagccggatcatcagcggcacagcggtcgatgcgcccggcgacgcgcccagcaatgcggcgagtgagccgtcggcgtgggcgacaatctccgtaccaaactggagcacgccgcctttttcggagtcttttttaatgatttggacgcgttgccctgcggtgatgagttcccagtcgtcggggtttgcctcggggtagtattccagcagggaggcgaagcgttcttctttggttttacgcaattcgcccagcaggtatttggtcagcggcatattcgcccagccggcgcacagcataggatagaggttgtccatatggatggacagcggcaaatccataagcgagccttgcttgaggaagttggaacggaagcctgcgtaagggccgaacataaggtggcgtttgccgtccacgttgcgtgtgtcgaggtgcgggacggacatcggcggcgcgccgacggaagcctgcccgtacactttggcgttgtgttgttcggcggtttcggggttgctgttgcggaagaacaggccggacacggggaagccgccgtagcctttgccttcggggatgccggatttttgcagcagggtcagcgcgccgccgcccgcgccgaggaagaggaagcgggtacggagggtgagctgcccgtcggggttgcgggtatcggcggttttgagcacccacgcgccgtcggattcgcgtttgatgtcttcgacgtggcggttgaactcggtttttacgcccttgccctgcaaatatttcaccatttggcgcgtcagccgtccgaaatcgacatccgtaccttcggcggagtagttggcggcgacgggttggttttcgtcccggccgcgcatcatcagcggagcccaatcggaaattttgttccgatcggtggaaaattccatattttcaaaaagtttttgggttttaaacgcgtcataacgtttttgaagataagaacaatggtcttcattcatcaccaaagacatatgcggcacggcattgatgaaggaattgtcttccaacttgccttccgcgaccagcgtcgcccaaaactggcggctgacatgaaactgttcggcaatattgagggcgcgcgccggatcgataatcccatttgcacccaacggcgcatagttcaattcgcacagcgcggaatgccccgtgccggcgttgttccacgcgtttgacgattccaacgccacatcttccaagcgttcaatcagggtgatttcccaagacggttcgagttctttgagcaaaacgcccaaagtcgcgctcataatgccgccgcccaccaagacaacgtctgtcgcttcagccatggtttactcctaaaaaacaggcatcttctgcccttatggttatttgccgtactacaaacgcctgaatcgcaaaagcagggaaaaccggcaatggtgtgtgtccgagtatgctgtttcggggttggaatgcgttgcaagcatggcttccgacaccgcttcaggggcttgtaatatgttatcgtgaatgtagtggattttactgggaaatgcaaagtttttctgtcgcccgccaagtcgggaaactgcgaaatgaaaaataaaaatagttatttatctatatatatcaaatttttaatagataaaaaatcaaaattgtttatatattaatttttaaaagattgtcagcatattgcgttaagttttttatagtggattaacaaaaatcaggacaaggcgacgaagccgcagacagtacaaatagtacggaaccgattcacttggtgcttcagcaccttagagaatcgttctctttgagctaaggcgaggcaacgctgtactggtttttgttaatccactataaatttgaaaatactgcctcacacctgcacgccataccctgccaacctgccggtcaggatttccctgtttttgcaccaatcttccctcagcatactgtacacgaccgtatcgcgcacactgccgtctttacggagcatatgcatacgcagcacgccgtctttttccgcacccagccgttcgatggcacgttgcgaggcaaggttcagaatatccgtgcgccatcccacgcaacggcaagccaaaacatcaaatgcggaatccaacagcatgattttgcaacaggtgtttatccgtgtccgccgtgccgatgccgcataccatgtgaatccgatatccaaacgcggaatctgcggttcaaaatgataatacgccgttgtcccgaccaccctgcccgcctcttcatcgacaaccgcaaacgccaaacgcgttgccaatgctgtcccgatatagtctgccaccctatccggatggggcgcggacgttacccccagcttccaaacctccccatcgcaaaccgcctcgcgcaaacccgtttcatgatgcacatccaacggttcgagacgaacgccgcccaacgacaagaccggcagtattatcttttccgacatccttttctcccaatattccgccttcagacggcatttccgcccggaatgccgtctgaacggctaaaaacacaatatccccgcctccgacacaaaaccgtccaaagaccggtcgtgcgcctcgaccggcagcctgtccaccaactggcaggcaaagcccacgcccacggtttttgcctgcaaacggtatttcatcgctgaaagcgtcgcatcgtaatagccgcctgcctgtcccaagcggtagcccagcctgtccataccgaccactggcacaagcaggaggttcaaatcatgcacacgctttttccgacctgcaaactgagggacatgcagcttcgccctaccgcgcttgcgttcttgttttactccatcggcaggatacggcgtaaaccacatccgccgcgaacgcggttcgatataaggcaggtagagttccgcaccgcgtttttgcgccgcgcggacaaagccgtccaaacgcaattccttgcccatcggccaatacacgccgattttccgcccttttttaatataacgtttgagcaggtggttgatttttaccgttgccgccgcccgcacgtcccgccccatttgcgaacgccgcccgcgcaattcgcggcgcagggcgcgtttttcctcgttcctcatttcagacggcctttcaggattgcggtagaatgttgcgattataacgattttgttaacattcaaacaggacgcacacaatgtggcacatcgtcgccatcggctatctttttgttgccgttatgtattccgccgcgcagccgagtattgcgcgcgccttgatttatttggttttttgggcggtgctgcccaccgtgttcacggttttcaccattaccgtccgccgccgcaaccacctgatgaggcagcaggaacaggcggaatccgaacagcagcgcgcacaacggcaaaaagacagcggcacaaaaccctgaatcccttttcagacggcatcttatccgctataatccgtcagttttccatttcggaaacacactattttttaaaacttatgcccactttcgccgaagggtgcttgacaataggcgtgacctatcaagttctatgcgattgaatgtgtgctcttaaccctttcaaggaaataaaatgtctcaaattactatgcgtcagatgattgaagccggtgttcacttcggccaccaaacccgtttctggaacccgaaaatggcacaatacattttcggtgcgcgcaacaaaatccatatcgtcaacctggaaaaaaccctgccgatgttccaagacgcgcaagaagccgtacgtcgtctggttgccaacaaaggtacagtattgttcgtaggtaccaaacgccaagcccgcgacatcatccgcgaagaagcgacccgcgccggtatgcctttcgtcgattaccgctggttgggcggtatgctgaccaactacaaaaccgttaagcaatccatcaaacgcctggaagaaaaaaccgcagccttggaaaatgctgccgaaagcggtttcagcaaaaaagaaattctggaaatgcaacgcgatgttgaaaaactggaacgttctttgggcggtatcaaaaacatgaaaggcctgcctgacgcgattttcgttatcgataccggctaccaaaaaggtactctggttgaagctgaaaaattgggcatccctgttatcgccgtagtcgataccaacaacagccccgacggcgtgaaatacgttatccccggcaacgacgactccgccaaagccatccgcctgtactgccgcggcatcgctgacgcagttttggaaggcaaaaaccaagcgctgcaagaaaccgtagccgctgcccaagaagccgctgccgagtaatccggcaaaccgaagaggggcgttatgccccttttctcaaatatgccgtctgaacgtccgttcgcggcacacgattcccgaatgcggaaaatcctttccgtatttcccaaaaatctaggagattcaaaatggcagaaattactgcaaaaatggttgccgacctgcgcgccgctaccggcctgggcatgatggaatgcaaaaaagccttggttgaagccgaaggcaacttcgacaaagccgaagaaatcctgcgtatcaaatccggtgcgaaagccggtaaactggccggccgtaccgctgccgaaggcgtattggcttacgcgatcaacggcaatgtcggcgcattggtcgaagtaaactgcgaaaccgacttcgttgctaaagacgcgggcttcgtagaatttgccaacttcgttgcgaaaactgctgccgagaaaaaaccggcttctgttgaagaactgagcgaactggttgaagcagaacgcaaagccatcatcgccaaattgggcgagaatatgtctgtccgtcgcttccaagtgatcgacactgccaaccaactggttgcctacatccacggcgcattggcgaccgaaggcgtattggttgagtacaaaggctctgaagacgtagcacgcaaaatcggtatgcatattgttgccgctaaaccacaatgcgtaagcgaagccgaagtagatgccgaaaccgttgaaaaagaacgccacatctacaccgagcaagccatcgcttccggcaaacctgccgacatcgccgctaaaatggttgaaggccgcatccgtaaattcttggctgaaatcactctgaacggccaagcattcgtgatgaaccccgatcaaactgttgcccaattctctaaagaaaacggcactgaagtgatcagcttcgtacgctacaaagtaggcgatggtattgagaaaaaagccgtcgattacgcagccgaagttgctgccgctgctaaagtgtaaggcacttatgaaaaagaaagcacctggattccaaacgaatcagggtgcttttttttgagaaaaccgtttacggtacctattttaagacgaccgaatattcagaccgtcttaaaacaaaacaataataaaccgacacaccctatcattaatattccgaccgttggaaattcagacggcccaactccgaccgacgacattcaagaaagcaaggtatccatgacacagcaaatcaaatacaaacgcgtattactgaaactctccggcgaatccctgatgggttccgatccgttcggcatcaatcacgataccatcgttcaaactgtcggcgaaattgccgaagtcgttaaaatgggcgtgcaagtcggtattgttgtcggcggcggcaatattttccggggcgtatccgcccaagcaggcagcatggatcgcgccaccgccgactacatgggcatgatggcgaccgtgatgaacgcgttggcactcaaagacgcatttgaaactttaggcatcaaagcgcgcgtacaatccgcactgtctatgcagcaaatcgctgaaacctacgcccgccccaaagccatccaatatttggaagaaggcaaagtcgtgatttttgccgccggtaccggtaacccgttcttcacgaccgacactgccgccgcattgcgcggtgcggaaatgaactgcgacgtgatgctcaaagccaccaacgtcgacggtgtgtacaccgcagacccgaaaaaagacccgtccgccacgcgctacgaaaccattacttttgacgaagccttgttgaaaaacctcaaagtcatggacgcgaccgctttcgccctctgccgcgaacgcaagctcaatattgtcgtcttcggcatcgccaaagaaggctcgctcaaacgcgtcattaccggcgaagacgagggaacgctggttcactgctgattgaccatagtgtcggcagatatagtcgcatatgggcttcagacagccatttattatatggagattatagtggattaaatttaaaccagtacggcgttgcctcgccttgccgtactggtttaaatttaatccactatatttacaattttgatacaatttgtttttcatcaaaggagaaaatctatgcaagcacggctgctgatacctattcttttttcagtttttattttatccgcctgcgggacactgacaggtattccatcgcatggcggaggtaaacgctttgcggtcgaacaagaacttgtggccgcttctgccagagctgccgttaaagacatggatttacaggcattacacggacgaaaagttgcattgtacattgccactatgggcgaccaaggttcaggcagtttgacaggggggtcgctactccattgatgcactgattcgtggcgaatacataaacagccctgccgtccgtaccgattacacctatccacgttacgaaaccaccgctgaaacaacatcaggcggtttgacaggtttaaccacttctttatctacacttaatgcccctgcactctctcgcacccaatcagacggtagcggaagtaaaagcagtctgggcttaaatattggcgggatgggggattatcgaaatgaaaccttgacgactaacccgcgcgacactgcctttctttcccacttggtacagaccgtatttttcctgcgcggcatagacgttgtttctcctgccaatgccgatacagatgtgtttattaacatcgacgtattcggaacgatacgcaacagaaccgaaatgcacctatacaatgccgaaacactgaaagcccaaacaaaactggaatatttcgcagtagacagaaccaataaaaaattgctcatcaaaccaaaaaccaatgcgtttgaagctgcctataaagaaaattacgcattgtggatggggccgtataaagtaagcaaaggaattaaaccgacggaaggattaatggtcgatttctccgatatccgaccatacggcaatcatacgggtaactccgccccatccgtagaggctgataacagtcatgaggggtatggatacagcgatgaagtagtgcgacaacatagacaaggacaaccttgattcacactaccataaccgcttgctaccaaggaaaacaaaatgaatttgcctattcaaaaattcatgatgctgtttgcagcagcaatatcgttgctgcaaatccccattagtcatgcgaacggtttggatgcccgtttgcgcgatgatatgcaggcaaaacactacgaaccgggtggtaaataccatctgtttggtaatgctcgcggcagtgttaaaaagcgggtttacgccgtccagacatttgatgcaactgcggtcagtcctgtactgcctattacacacgaacggacagggtttgaaggtgttatcggttatgaaacccatttttcagggcacggacatgaagtacacagtccgttcgatcatcatgattcaaaaagcacttctgatttcagcggcggtgtagacggcggttttactgtttaccaacttcatcgaacagggtcggaaatccatccggaggatggatatgacgggccgcaaggcagcgattatccgccccccggaggagcaagggatatatacagctattatgtcaaaggaacttcaacaaaaacaaagactaatattgtccctcaagccccattttcagaccgttggctaaaagaaaatgccggtgccgcctctggttttttcagccgtgcggatgaagcaggaaaactgatatgggaaagcgaccccaataaaaattggtgggctaaccgtatggatgatgttcgcggcatcgtccaaggtgcggttaatccttttttaatgggttttcaaggagtagggattggggcaattacagacagtgcagtaagcccggtcacagatacagccgcgcagcagactctacaaggtattaatgatttaggaaaattaagtccggaagcacaacttgctgccgcgagcctattacaggacagtgcttttgcggtaaaagacggtatcaactctgccaaacaatgggctgatgcccatccaaatataacagctactgcccaaactgccctttccgcagcagaggccgcaggtacggtttggagaggtaaaaaagtagaacttaacccgactaaatgggattgggttaaaaataccggttataaaaaacctgctgcccgccatatgcagactttagatggggagatggcaggtgggaataaacctattaaatctttaccaaacagtgccgctgaaaaaagaaaacaaaattttgagaagtttaatagtaactggagttcagcaagttttgattcagtgcacaaaacactaactcccaatgcacctggtattttaagtcctgataaagttaaaactcgatacactagtttagatggaaaaattacaattataaaagataacgaaaacaactattttagaatccatgataattcacgaaaacagtatcttgattcaaatggtaatgctgtgaaaaccggtaatttacaaggtaagcaagcaaaagattatttacaacaacaaactcatatcaggaacttagacaaatgaatgaacacaacctgttaattttctgtttaaaagacaatgtttcaattagtgaatatactgaaatggttgattgggcttatgaaaacattcaatctgaaacagttgtagaaattacggaaaatcaaattattgaatatcaaaatcgtggattatgggggcttgtttctgaaattaccgataattggttatttggaccaagtgagggggattggctaatagataaggaaagtattttggctgtaaaagaaaaattacaaaattcagatttttctacagagcccttagtgaaaaatattattcatgtacttgaatatgctataaagaatgaaaaaacagtaatttttcatttttgaaactaatctaatttttagcagccgtaggtcggattctcgaatccgatattttccaacagcggcatttcggaaacgatagatgcgtcaaatatttttgtcggatacaaatatccgacctacatctctgcgcagcaaactttacaagatattaatgaattaggaaatttaagtccggaagcacaacttgctgccgcgagcctattacaggacagtgcttttgcggtaaaagacggcatcaattccgccagacaatgggctgatgcccatccgaatataacagcaacagcccaaactgcccttgccgtagcagaggccgcaactacggtttggggcggtaaaaaagtagaacttaacccgaccaaatgggattgggttaaaaataccggctataaaacacctgctgttcgcaccatgcatactttggatggggaaatggccggtgggaatagaccgcctaaatctataacgtccaacagcaaagcagatgcttccacacaaccgtctttacaagcgcaactaattggagaacaaattagtagtgggcatgcttataacaagcatgtcataagacaacaagaatttacggatttaaatatcaattcaccagcagattttgctcggcatattgaaaatattgttagccatccaacaaatatgaaagagttacctcgcggtagaactgcgtattgggatgataaaacagggacaatagttatccgagataaaaattctgacgatggaggtacagcatttagaccaacatcaggtaaaaaatattatgatgatttataggaaaaagccatgaatatactatccataaataatcaaaactcaactatttcactaactcaagatgaagtttttgttttacgagctatcttgaatgagatatatgcgggcgtatgtgtagattcaagagaatttgaaaatgtatctggtgttagaaaacatgaagtagataatttacaacaacagtttgctggaatttataaaaaaatgacaacttaacaacccaaatttttgtcagagcctagtgcaaattacaactatgattctattgtagccgaaatgaaagaaaaaaatcatgggttggcgacagggttgatgttgttaatatgcctgatggagcacctactagtatggataacacgcgtattatggcagcacgtgaagcaggagtaaaagtggaagcgaatgttcataattttaatgaccgattatcatcaaaagagagaatcaggtttaagcatgatggtattgagcctcaaacttggggagaagctatccagctacgaattagaaagcaagaaacacaaaaaggagttccagaagggtggagcaaaagatttcctaacggaagtatttatgatgtaaaggtacttaggaaatgataaaacaaaatagttttgttccgtatcctgaagcaatgcttcctaaaggatttaaatatccgcaaagttatttaaaattagctcaatccactcatgccattaactacgatgaacaatattcttttccttggtggtttgaaaatgcagaaagcaatatatcagaagtaattgacatttattttgaaataactggcattccaaacctattaccttttgctagaaaccaagagtgggctgcctgttttgatatttcagataaatcaggtaatcctaaaattatagtagttaatttagataatacaaaatattacgagacttttgaaaattttgatacttggctaaaagaagctgaaaatgatggttggtagcaaccgtaggtcggattctcgaatccgacatttttcaacagcggcatttcggaaacgatagacgcgtcaaatatttttgtcggatacaaatatccgacctacatctctgcgcagcaaactttacaagatattaatgaattaggaaatttaagtccggaagcacaacttgctgccgcgagcctattacaggacagtgcttttgcggtaaaagacggcattaattccgccagacaatgggctgatgcccatccgaatataactgcaacagcccaaactgccctttccgtagcagaagccgcaactacggtttggggcggtaaaaaagtaaaccttaacccgaccaaatgggattgggttaaaaataccggctataaaacacctgctgcccgccctatgcagactttagatggggagatggcaggtgggaataagccaccaaaaccaagtacgcagcaacaccctacacactctgataacaatatcggcttacctgcctcatatgttaaacctgatacatctatttctccgacaggaacaattcaagaccgcatcagatggacaaagtccaagtttcctactgagaaatctttaaatggacatttcaaagctcatggaaaagaatttggcgatataaccattgaagactaccaaaaaatggcgtctgatttgttatcaaaacagacatcggacaagatattaggttatcagacggaacatagacgagtgcgctatgatatcaataacaatatctatgttttggccaatccaaaaacattcaaaatcaaaacaatgtttaaaccaaacttaggaaagaagtattatgatggagaattcaaaaaagacatgggaaattgacggagaaatatggctacattgtcctgtttgcggaactgaagttatggactatgatatctgtgacgtttgtcagtggcaaaatacaggagaaactaatatagatggtggccctaatgaaatgacacttgcggaggcgaaagaagcttacgcaaaaggcttaccaatcagataaataagcacctagagaaatcaatgatgacggaatcccatggttacctatcaaataatttacctgttaaaatcataaatgatattatttatgcaacccagttagtcgaagatttggttttaggaaaaataaaaattgttgattttttaaaatcatataacaatttttattgttggcttggttttgatgagttgcctcaatctgagaaaataaaattcctaagctatcttaatatattaagtattcataaagaaatacaagatgaaactgtgaatagggtttataccgattgaaaaatagtagatagagattaacatgttaaatgaaatttttgaaatttattcgagacaaggggaatctttgataggaattggaattagagaagccgcattacccgtccctattgcaatagatatattaaatttatttatcaatgagagaatacttgtattggggggagatatttatatcaagaaagataattatttttatcaaacatatgataattggtattacgagggaagtaatttatttaacagtatcgacaaagcaatgcattatttatctcaaataaaattagagaatgcatacgtatcttttgtgttgaaatttatctaacaaaggaagcacaagaatagatttatagtaaaacatcaagatgttgaaaatgctgggttttaatccaacctacactgaccggctcagatacagccgctcagcagactctacaaggtattaatgatttaggaaatttaagtccggaagcacaacttgctgccgcgagcctattacaggacagtgcttttgcggtaaaaaacggcattaattccgccagacaatgggctgatgcccatccgaatataactgcaacagcccaaactgccctttccgtagcagaggccgcaggtacggtttggcgcggtaaaaaagtagaacttaacccgactaaatgggattgggttaaaaataccggctataaaaaacctgctgcccgccctatgcagactgtagacggggaaatggctgggggaaacaaatcattaaaaatagggacacaatctgttgaaaaatcaaccggtcgtacaatacctaataatttaaaggaacaattagcaatggaagaagttaaggcaaacccacagggcaaaactcctgcgagaatacctcctatgtccgatactaaaaatggttggttagcaaaagacggttgggttaagcgtgttcaaaacgtaaacaaaattgaaatacattacattgaaaactcaagaaccggtgagaaaacagattttaagtttaaggattagtcatgtttttagatgatgtaaatgtttttttagatgatttaaatgtttttttagatgatttaaatactaatccaatcactgacgaatggtatatgtccaattttgccgataaacatattaaaattttggaaagttacgaagcctttgatattctaaaacaatttgttgattacatgattgaagaatatgatgaaaaatcagaatatgaaatcatggaaatattgagacaattaaaatatcaagcagataccaacgaaaaattttatacaaatacacagaaacagaaaattgtagaattatataaacaagaaattagtcaggatattttaaatgaaatctttagataaactatcaatatagaaggaaatccttggaaaaaataaaatgataatcgaacacaatggaaatatacataaaatagccagaatgactggaaataaaaataattttttagaaataatcctatcagatattcatgaaaacataaaaatcaaaccattaactataaaagtaaaaggagagaatgttataaatatccttcctgaggaagttagtttttatgtaaaacaaggtgttgatttaatttatgaaaaatataaacggaaattctttatctccgaaatttctttttgccaatcagatagccggccttcaagtatctacgcttttcttacatttcacttgcttgaagatattattaaaaatgaatccccatccaactacacctgactggctaatagcaggtatgaaccgtgtattcatatcaatataagattaattacggcagaatttgatgaaattagacaaaaacttatcgtaagattttatttagacagagaagtaactgatgatggcaaagaagatatggaaacagcacgaacagaattacttccaggaggatatgcttcatctctggtagtttgacagatttgaccgcttcataaacttagaacattaattaatgatgataatgtttatatgattggttctaaggatagcaaaagcaaattcagaaggaacatgaatggctatttatgacttaaacgaaatagccgtaggtcggattctcgaatccgacattttccaacagcggcatttcggaaacgatagatgcgtcaaatatttttgtcggatacaaatatccgacctacatctctgcgcagcaaactttacaaggtattaatgatttaggaaatttaagtccgaaagcacaacttgctgccgcaagcgcattataggacagtacttttgcggtaaaagacggtatcaattccgccagacaatgggctgatgcccatccgaatataactgcaacagcccaaactgcccttgccgtagcagaggccgcaggtacggtttggagaggtaaaaaagtagaacttaacccgaccaaataggattgggttaaaaataacggctataaaacacctgctgcccgccctatgcagacgttggacggtgagatggcaggaggaaacaagccagttgttaaatctatcagaccaactacgcgagatgaattacgtcaagcattgcaagaacaaggttttagacgtactggttcagatgcggctcaatatgaaacatggaaaggtcctgatggcgtgaaaatagatattcgtccaaatggagaggttataagaacccaaagagtgccgcgaaccgatggtgtacagggaaaatatccgcaacgacaagattatgaaggcaatccattgccaaataatcatcatcattctggatattttgtcaaatgaaaaaaaatatttttcacaatgtaagcctttatgaaataatcttttccgataatggaaatacccttacattatcttttacagatacaattgaaggtaattatttcggatatatcaaatgcagtaatattttgaattttaaattagatacaaataatttcgtagattatgaggataaggaagatagcttgtttcccttgtttatacccgaaatagagctatataaataccaattttatagtgaaattattattgatgtagggattattataaaaatatctgctgaaacaattaattttgagccactgggaaaatagtaactgctttcccagcagccgtagcaactgtatttttacccgacggggtaaaaatacagttgctacatctctgcgcagcagactctacaaggtattaataattcaggaaaattaagcccggaagcacaacttgctgccgcgagcatattacaggacagtgcttttgcggtaaaagacggcatcaattccgccagacaatgggctgatgcccatccgaatataacagcaacagcccaaactgcccttgccgtagcagaggccgcaggtacggtttggagaggtaaaaaagtagaacttaacccgaccaaatgggattgggttaaaaataccggctataaaaaacctgctgttcgccatatgcagactaaggcgttaggtacggtagatgaaattggcgatacagtacagcaggttgggaaacaggctagcggacaaaaaaccagcggtggtaatcctgcgattgatagcgacccctatagcccgagtagtgtggcagctcgcatagaagccggtaaggcgcgcagtgatttacaaatcaaagacattttgagcaatactactcaaaggagtaaaacaaaaggtcccgctgttcagtatgataaagtgggggattacaatgacgcactaaatgattttaatagtctgaatgttcgaaatgtacaaacacgtcctaatggaacgataacgggcaatttacctgatgggcgtgcggttaatgctcgtaatgatagtagtggtggagaaccaacacttgaaataacaattagtaataaccgaaaaataaaaatcagatatggaaatacacgataaattatgaaattaaaaagcttagatttcccaactggctatttctattttgataatgcagcaataaactctgataaagtagaagttatagcagttggttatagaaatacggataaaaccataaaaatttttattgaagatgttattcattttagggttgttgatgaatcgtattttatagatacttttatggatttaatttcggaagatgcagatagagctttgcttcatgaaaatggtggtcaatctttttttgaacttcttgatgagtgttatgcggaatggatattgaaagaaagttattttcctttgaatagagaattctttaaatactatatttttatgtttgagcaaacattcatagaaataattggttctagtgcaacgtattcaattattgagggctagcgtaagatgagtaataagttgcctatctttctttcaggcagcctgaaaataaaactacccaagttgatggtgtacctgtatcagtgaagggaaattttgttgatggtaaatttcgcattggtacggcaacaatgaaatcattttaaattgagctagaaatgaacctagaaaattatgaaaacattttaataaaattacttttttatcataacaacttagtaaatgaatattcttattttattgaaaataaaaatttatttaaaatagtatctcgaacgaaaacgagtaagggcttttttttcactatagaaaaaccattaaattttctaagcaaaaaaacttattttgagtttaattttaaatatttacactcagggaaagaacgctttggttcgtttatgtgctggataaatactaatttaatggaatttgagggggttttttttaacgacctgctccctgataatatgataataaataacttttttgaaataaatgattaacgatacaccaataaaaattggtggggtaaccgtatggatgatattcgcggcatcatccaaggtgcggttaatcctttaatttacaaggtaagcaagcaaaagattatttacaacaacaaactcatatcaggaacttagacaaatgaatgaacacaacctgttaattttctgtttaaaagacaatgtttcaattagtgaatatactgaaatgattgattgggcttataaaaacattcaatctgaaacagttgtagaaattacggaaaatcaaattattgaatatcaaaatcgtggattatggagacttgtttctgaaattaccgataattggttatttggaccaagtgagggggattggctaatagataaggaaagtattttggctgtaaaagaaaaattacaaaattcagatttttctacagagcccttagtgaaaaatattattcatgtacttgaatatgctataaaaaatgaaaaaacagtaatttttcatttttgagactaatccaatttttagtaatattgatgcagagcaagcagcattagatgccgcaaacatggggagaagctattcaatttagaattaaaaaacaaattgaaaatgaactagcaccaccaaattggtctacccagtttcctaatggtagtatttatgatcctaaggtaacgaaatgattattcaaaatgaatttaatttatatcctagtaatatgcttcctgaaaggttttgttatcctgaaaagtatgttcgtatctctaacgatacatctttaataccttatattcagccacataattttcactggtggtttgagaattatggaacagaaggggcagaagtagcttatatatttagaaattctatcctgcctgatttaaatcttatcccattcgctagtaatggagaatgggaagcttattttgatggtaatgatgtaacaggaaattctagggttattgtcattaatttagataatatagaaaaccatgaattttttaatagttttgaagattggcttgaattagcaattaaggatacttggtaagcagctatctataaagagatgaggctgccctggacaactaggataaactcgattttactaattgttttaaaatggaacaagaacttttatttcactgttgttaaaacgccattcgcactcctttaaatacagctcaaaatgcgctttgggaatgccgttaaacttgcgtaaatgacgttttgcttgattccaaaagttctcagttccattaatatggttttgtcgttcggcaaaatgtgtgctgtgattgatacggaaatggctaaattcgcccgcatccaatacatcatagccacgataacaaaatgagtttattttgtttataccgtcttagacgactttctctcatagggataattctaacttaatttgaatttccctagtgatctagggcagcccctaaattaataaagcagcacaactccttttgccgatgttccggactgtcaaacgactgttcctcatgccacatctccatcaaggtacggataacccgctccgccttaccgttggtctgcggacaagcaaatcgggcaagcctccaaccaatcccattatcataacaagctgcaccgaaagcatgttggacggctctttatattacctatcattgtcagagtaaacgtactcaatcaggtacaagcaggggtcggacagatgttcggtcagaaacttggcagcactgtctgcggttttgtccggcaaaatggcagagtataaaaatcgtcaatagcgacaaacaggtaatctcgtttatcagcggccttctgtcctttgagcaacaacaaccgatcggtatcaggatgcacaaaacctcccggggacaacctgccttttacggctttaagtgcacggtaaatagtgacgcggctgacttagtggcagcatactggggaggtgagtgtttttgtgtatatttttattttggtattcccttagaaatactgtaaacaacgctaccggacggcctgcagggcttcgcgcacgcttgctttgagttctgcgccgaagcgtctgcccaagattctgccgaaatcgtccttcggagtgtaatccaccacatcgggggctttgaccacgtctcgcgccacgctgtaaatattgccgagtccgtccaccagcccgactttcagcgcatccgcgcctgtgtacacgcgaccgctgaacacgtcgggatattgtcggaatttgaggcggccgccgcgtccggttttgacggctttgatgaactcgccgtgtatgccggtcagcatttcttcccagatttttgactgttcgggcgtttcgggcgaaaacggatcgcccatgcctttgttgctgcctgcaattttaaccctgcgtttcacgccgattttttccatcaggccggtcgcgtcgaaactgctgccgataacgccgatgctgccgacgatgctggacgggtcggcatagattttgtccgccgccgccgcgatgtagtagcagccggacgcgcacatatcttccgccacgagataaacgggaatgccggggtgctgcgccttcagacggcgtatttcttcaaaagcggtgttggacacgacgggcgaaccgccggggctgttggcgcggatgacgatggcttttgcctgcgggtttttgtaggcggcctccataccgtctttgagttttttgacctggtcttctacaccgttgccgatttcgccgtacagattgacgactgcggtatgcggcgtgttgcccgccaactgcaatgcggcttcgtcttttcggaaaatgcctgcaatcagggcaaccagaatcagggtgctgacggcgcgccagatgtttttccacatccgctccctgcgcctgtcctgataggcggacaacagcacttcgcgcatgatgtcgcgctcccataaggtttcccccgcattttttgcttcgggtgcttcgttttctcttctgattcggtattgcatggttttccttaaatattgtccgatttgggcaaacggttttcagtttacccgatttttcagctctgctcccaatccgtccaagctgtgcaacacttccgcccacgccgcgtccaaaaggttgacggcttctccttcggctttgatgccgaactcaatgtgcggtttgacctgcgtgccgtctgaatgcgtccaaccgacgctgggcaggctgtacgaacgcacgccgggataagtttgctcgatatgctccataagcggcgtaatgcgcgattcgggctgctcaaacacatacacgctgcggctgccgcgttcggtttggttgaagcggtcggcgtaataagtttccaatacccattccgccatcgggtgcgccatcacaggaaagccggggaagaaataatgctcgcggatagaaaatccggcgatgttgttaaacggattgggcaccaattccgcgccttcgggaaaatctgccattttcaggcgttgggcgtgttccggcgaatcaagcggctcgccgcgtttctgggttatgccttcgataaacttggcggcttcagaatggcggacgacgggcaaatccaaagcagcggctgcggcttggcgggtgtggtcgtcgggcgtggcgccgataccgccggtaacgaaagttggcatgccgtctgaaaagctgcggcgcagttgcctgaccagcaaatcgggttcgtcgggcaggtattgcacctgattgagcttcagccctttggattcgagcagggatttgaaaaaggcgaaatgcttgtcttggctgctgccgtgtaagatttcgtcgccgatgatgatgaggttgaacgcgttcatagatggtttctttaccgatgccgtctgaaaatgtcgatggtgctgtgatttgttccctctcccgtgggagagggttagggagagggtcgagcttgcgtttttcaggcagcgtttgcttaaggcctgctgtctgtaccctctccccaaccctcccccgcaggggagggagtcaggttgaggatggcgtaaagaccgtctgaaaagattttcagcgaaacgggcaaagcttcttttcagacagccttaacggctgacaatgggttatatttataagataatgaactccttttttcaagtccgaaggatacccttatgagccaaaaccataccattctgcaatccctccccgtcggtcagaaagtcggcatcgccttctccggcggtcttgatacctctgccgcgctgttgtggatgaaactcaaaggcgcgctgccttatgcctacactgccaacctcggccagcccgacgaagacgactacaacgccattcccaaaaaagcgatggaatacggtgcggaaaacgcccgcttaatcgactgccgcgcgcagttggcacacgaaggcatcgccgccatccaatgcggcgcgtttcacgtttccaccggcggcatcgcctatttcaacaccacgcctctgggccgcgccgtaaccggcactatgcttgtttccgcaatgaaagaagacgatgtgaatatttggggcgacggcagcacctacaaaggcaacgacatcgagcgtttctaccgctacggtttgctcaccaatcccgcgctgaaaatctacaaaccctggctcgatcagcaatttatcgacgaactcggcggccgtcacgaaatgagcgaatttctgattgccaacggcttcaactacaaaatgtcggtggaaaaagcctactccaccgattccaatatgttgggtgccacccacgaagccaaagacttggaatttttgaactcgggcatcaaaatcgtcaaacccattatgggcgttgccttttgggacgaaaacgtcgaagtcagcccggaagaagtcagcgtacgctttgaagaaggcgtgccggttgcactaaacggcaaagaatacgccgatcccgtcgaactcttcctcgaagccaaccgcatcggcggccgccacggcttgggtatgagcgaccaaatcgaaaaccgcatcatcgaagccaaatcgcgcggcatctacgaagccccgggtatggcgttgttccacatcgcctacgagcgtttggtcaccggcatccacaacgaagacaccatcgaacaataccgcatcaacggcctgcgcctcggccgcctgctctaccaaggccgctggttcgacagccaagccctgatgttgcgcgaaaccgcacaacgctgggttgccaaagccgttaccggcgaagttaccctcgaactgcggcgcggcaacgactactcaattctgaacaccgaatcgcccaacctgacctaccaacctgaacgcctgagtatggaaaaagtcgaagacgctgcgttcactccgctcgaccgcatcggacagctcacgatgcgcaacctcgacatcaccgacacccgcgtcaaactgggtatctactcgcaaagcggtttgctctcgctgggcgaaggttcggtattgccgcagttgggcaataagcaataaggtttgctgttttacatcattagcaacttaaggggtcgtctgaaaagatgatcccttatgttaaaaggaatcctatgaaagaatacaaagtcatcatttatcaggaaagcctgttgtccagcctgtttttcggcgcggcaaaggtcaaccccatcaaattcagcgagttcctcaataaacaaacccccgaaggctggcgggttgtaacgatggaaaaagatttgcgccgtatgctgctgtttttcaaacgcgaggcctacgtcgtcattttggagcgggatcgtgtttaagctcggcgtttatacctgtctcggactgtttgccggctgggtgctgctgctgatcgtgcaactctggttttcttttctcgaagcggaattgttcttcaaaatcacactgactatggcggggctgtttgtcatcatcctcgccgccttactggtatgcggtcagtatttttccgaaaagaaaatgaaagacgacgggtttatcaactgatgcggacttgaaccggacccgcgacccaaacatcacaatgccgtctgaacgccctcgcttcagacggcatcaacatcaatcctgctcttttttgccggcaaacacgccgaatccgcccttttccgcatctgtcgggcgatagctgtattttcccgccacttcctcgccggccgggccgtaaaactttccggaaacatccccgctgccattttccgtccaagtccccttaaagccgtttccatcgatggcggctttgaatttttgcgtacccatatgcaaatcatcgccgctgtcgataatgccgtccacagatttgctgccgaaatcgacttttgcggcaaacctgcccctggtcgggtacggacggccgttttccgtatggaaatgcagtacttcgccgttgtacacggccgcgcccgcaagcatttcgccttttgccggttcgccttgaacacgaagggcatacgatccgccgggcaatttttccgccccgtaagtcagataccggtaattcccttcgggcgcgaagatattgccggaatgccccgtcaggctgaccgcttccccatcgacaatcagcgtatccgcctgattgacgggaatcagcggcatctcggccggaagcgaccgcctcgaccgtgcagaacgcctaaatcgcgcaaatgaagtgggtttaggtttataaaagataatatattgattgattcccttcatctgcacactatcggcaaccaaaccgacaaatttatcattcttcccatctttcttgtaattacttattttgtctgcatcacttaatttttcaaattctgattttagctgtacttcttcatccaagaaattattgccactacaagaatcgcctttacagtgggtcaacgttatattttgcgacggcccgtcaatcaaaacgccattagccaaatcaacccttccaaaattgctaccgccattcgcaggtgcagggtttgacgcggggatgggatctgaagaaccggcggcttgattgtttccggcttgatttgcaccttgggcagccgtattgccggcattttgcccgcctgccgacggatcgtccccctgcattccgtccgccgcatttgccatatccggttggtttgccggctgagacgattccccggcatccgttgcttgattttccatatttccggcaagcatattcggatccggggtgtgattcggtgtcgaactatctgtaccggcggcattttgcggcatatcattttgtgccacctcgtcttcatttttgggattatccgctgttaccgcaccgccattgcctgtattttcttccgaaaccgccgccatatcttgactgccttgtgcggatggcgcgccctgtccttgagaacctgcctgtggcgcatcttcctttgcctctgtctctttttcagaaacaacaggggcggcaggttttgacagcgtgtccgccgacttgacatcgggcgatccgccaccgccgcccccgcaggctgaaagggcaaaaatacaagccattgcgattacgctgcgtttaaacatcatcatctccttcatcgtatttcctttttggtttaaaccccgccacttggacatccgtccttcggggcggtggaatcagctttatttgggaagagcgcaacctttccaaatcagggcgacacatagggctgtgctttatgtgccgccctgtgtgttgaaacatattcaataaatattgtttccgccgtatgcctataaaattgtaaaaatatgccgtctgaacgccaaacgggcttcagacggcatagcttggtttattccgcccggttcctctgtcggcccaaatcggcggcagcggtaaacaaaacgtcggtcgaagagttcagcgcagtttccgccgaatcctgaatcacgccgataatgaagccgacggcaaccacctgcatggccacatcgttatcgataccgaacaggctgcacgccaaaggaatcagcagcaacgagccaccggccacaccggatgcaccgcacgcgctaacggtagccaccaggctcagcagcagggcagtggcgaagtcaaccgtaatgccttgcgtgtgcgccgcagccatcgccaaaacggtaatggtgattgccgcaccggccatattgatggttgcacccaatggaatggagatggagtaagtgtcttcgtgcaaacccagctttttcgccaatgccatgttcacagggatattggcggcggaagaacgggtaaagaaggcataaacgccactttcacgcaggcaggtaaacaccagcgggaaagggttgcggcggattttccaccacacgatggcgggattgaccgccagcgcgataaacgccatacagcccaacagcactgcaagcagcttcgcgtaccccgccagcgcgccgaaacccgtctccgcgattgtggacgacaccagcccgaaaatgcccaaaggggcaaaacggataatccatttcacgacggtggaaaccgcttccgccaaatcggcaacgacctgccgcgtaacgtccgaaccgtgattccgcaacgccgcgcccaaaaccaaagcccaagccaaaatgccgatatagttggcattggcaatcgcgttaatcgggttggcgaccaggttcatcagcagcgatttcaatacttccacaatgccggaaggcggcgcggcggacacatcgcccgcgcccgccaaaacaatgtgcgtcgggaaaaccataccggcgatgacggcggtcagggctgcggaaaacgtaccgatgaggtaaaggacgataatcggcctgatatgcgccttgttgcctttttggtgctgcgcgattgtggccgccaccaaaataaataccaaaaccggcgcgaccgctttgagcgcaccgacaaacaggctgccgaacaagcctgccgccaagcccagttgcggggaaaccgaaccgattacgatgcccaacgccaaaccggcggcaatctgcctgaccaggctgacgcggccgatcgcatgaaataaggatttgccgaacgccataattcttccttatgttgtgatatgttaaaaaatgttgtattttaaaagaaaactcattctctgtgtttttttttattttccggctgtattttatagtggattaacaaaaatcaggacaaggcgacgaagccgcagacagtacaaacagtacggaaccgattcacttggtgcttcagcaccttagagaatcgttctctttgagctaaggcgaggcaacgccgtactggtttttgttaatccactataaggttgcgttgatttgccctatgcagtagtgccggacaggctttgctttatcattcggcgcgacggtttaatttattgaacgaaaataaatttatttaatcctgcctattttccgacactattccgaaacgcagcctgttttccatatgcggattagaaacaaaataccttaaaacaagcagatacatttccggcgggccgcaacctccgaaataccggcggcagtatgccgtctgaagcgtcccgccccgtccgaacagtgttaaaatcgaaagccgccacaccgatgcacgacacccgtaccatgatgatcaaaccgaccgccctgctcctgccggctttatttttctttccgcacgcatacgcgcctgccgccgacctttccgaaaacaaggcggcgggtttcgcattgttcaaaaacaaaagccccgacaccgaatcagtcaaattaaaacccaaattccccgtcctcatcgacacgcaggacagtgaaatcaaagatatggtcgaagaacacctgccgctcatcacgcagcagcaggaagaagtattggacaaggaacagacgggcttcctcgccgaagaagcgccggacaacgttaaaacgatgctccgcagcaaaggctatttcagcagcaaagtcagcctgacggaaaaagacggagcttatacggtacacatcacaccgggcccgcgcaccaaaatcgccaacgtcggcgtcgccatcctcggcgacatcctttcagacggcaacctcgccgaatactaccgcaacgcgctggaaaactggcagcagccggtaggcagcgatttcgatcaggacagttgggaaaacagcaaaacttccgtcctcggcgcggtaacgcgcaaagcctacccgcttgccaagctcggcaatacgcaggcggccgtcaaccccgataccgccaccgccgatttgaacgtcgtcgtggacagcggccgccccatcgccttcggcgactttgaaatcaccggcacacagcgttaccccgaacaaatcgtctccggccttgcgcgtttccagcccggtatgccgtacgacctcgacctgctgctcgacttccaacaggcgctcgaacaaaacgggcattattccggcgcgtccgtacaagccgacttcgaccgcctccaaggcgaccgcgtccccgtcaaagtcagcgtaaccgaggtcaaacgccacaaactcgaaaccggcatccgcctcgattcggaatacggtttgggcggcaaaatcgcctacgactattacaacctcttcaacaaaggctatatcggttcggtcgtctgggatatggacaaatacgaaaccacgcttgccgccggcatcagccagccgcgcaactatcggggcaactactggacaagcaacgtttcctacaaccgttcgaccacccaaaacctcgaaaaacgcgccttctccggcggcgtctggtatgtgcgcgaccgcgcgggcatcgatgccaggctgggggcggaatttctcgcagaaggccggaaaatccccggctcggctgtcgatttgggcaacagccacgccacgatgctgaccgcctcttggaaacgccagctgctcaacaacgtgctgcatcccgaaaacggccattacctcgacggcaaaatcggtacgactttgggcacattcctgtcctccaccgcgctgatccgcacctctgcccgtgcaggttatttcttcacgcccgaaaacaaaaaactcggcacgttcatcatacgcggacaagcgggttacaccgttgcccgcgacaatgccgacgttccttcagggctgatgttccgcagcggcggcgcgtcttccgtgcgcggttacgaactcgacagcatcggacttgccggcccgaacggatcggtcctgcccgaacgcgccctcctggtgggcagcctggaataccaactgccgtttacgcgcaccctttccggcgcggtgttccacgatatgggcgatgccgccgccaatttcaaacgtatgaagctgaaacacggttcgggactgggcgtgcgctggttcagcccgcttgcgccgttttccttcgacatcgcctacgggcacagcgataagaaaatccgctggcacatcagcttgggaacgcgcttctaaaccgatatggccacttcagacggcattgcagcaaaccattttgaaacagacattatgaccgataccgcaccgacagataccgatccgaccgaaaacggcacgcgcaaaatgccgtctgaacaccgccctaccccgccggcaaaaaaacgccgcccgttgctgaagctgtcggcggcactgctgtctgtcctgattttggcagtatgtttcctcggctggctcgccggtacggaagcaggtttgcgcttcgggctgtaccaaatcccgtcttggttcggcgtaaacatttcctcccaaaacctcaaaggcacgctgctcgacggcttcgacggcgacaactggtcgatagaaaccgagggggcagaccttaaaatcagccgcttccgcttcgcgtggaaaccgtccgaactgatgcgccgcagcctgcacattaccgaaatttccgccggcgacatcgccatcgttaccaaaccgactccgcctaaagaagaacgcccgccgctcagccttcccgacagcatagacctgcctgccgccgtctatctcgaccgcttcgagacgggcaaaatcagcatgggcaaagcctttgacaaacaaaccgtctatctcgaacggctggatgcttcataccgttacgaccgcaaaggacaccgccttgacctgaaggccgccgacacgccgtggagcagttcgtcgggggcggcctcggtcggcttgaaaaaaccgtttgccctcgataccgccatttacaccaaaggcggactcgaaggcaaaaccatacacagtacggctcggctgagcggcagcctgaaggatgtgcgcgccgaactggcgatcgacggcggcaatatccgcctctcgggaaaatccgtcatccacccgtttgccgaatcattggataaaacattggaagaagtactggtcaaagggttcaacatcaatccggccgccttcgtgccttccctgcccgatgccggactgaatttcgacctgaccgccatcccgtcgttttcagacggcatcgcgctggaaggttcgctcgatttggaaaacaccaaagccggctttgccgaccgcaacggcatccccgtccgtcaggttttaggcggctttgtcatccggcaggacggcacggtgcatatcggcaatacgtccgccgccctgctcggacggggcggcatcaggctgtcgggcaaaatcgacaccgaaaaagacatcctcgatttaaatataggcatcaactccgtcggcgcggaagacgtactgcaaaccgcgttcaaaggcaggttggacggcagcatcggcatcggtggcacgaccgcctcgcccaaaatctcttggcaactcggcatcggcacggcgcgcacggacggcagcctcgccattgcaagcgacccagcaaacggacagcggaaactggtgctcgacaccgtcaacatcgccgccgggcaaggcagcctgaccgcgcaaggctatctcgagctgtttaaagaccgcctgctcaagctggacatccgttcccgcgcattcgacccttcgcgcatcgatccgcaacttccggcaggcaatatcaacggctcaataaaccttgccggcgaactggcaaaagagaaattcacaggcaaaatgcggtttttacccggcacgttcaacggcgtaccgattgccggcagtgccgacattgtttacgagtcccgccaccttccgcgtgccgccgtcgatttgcggctggggcggaacattattaaaacagacggcggcttcggcaaaaaaggcgaccggcttaacctcaatatcaccgcacccgatttatcccgtttcggtttcggactcgcggggtctttaaatgtacgcggacacctttccggtgatttggacggcggcatccgaacctttgaaaccgacctttccggcgcggcgcgcaacctgcacatcggcaaggcggcagacatccgttcgctcgatttcacgctcaaaggttcgcccgacacaagccgcccgatacgcgccgacatcaaaggcagccgcctttcgctgtcgggcggagcggcggttgtcgataccgccgacctgatgctggacggcacgggcgtgcagcaccgcatccgcacacacgccgccatgacgctggatggcaaaccgttcaaattcgatttggacgcttcaggcggcatcaacagggaacttacccgatggaaaggcagcatcggcatcctcgacatcggcggcgcattcaacctcaagctgcaaaaccgtatgacgctcgaagccggtgcggaacgcgtggcggcaagtgcggcaaattggcaggcaatgggcggcagcctcaacctgcaacacttttcttgggataaaaaaaccggcatatcggcaaaaggcggcgcacacggtctgcatatcgccgagttgcacaatttcttcaaaccgcccttcgaacacaatctggttttaaacggcgactgggatgtcgcctacgggcgcaacgcgcgcggctacctcaatatcagccggcaaagcggcgatgccgtattgcccggcgggcaggctttgggtttgaacgcattttccctgaaaacgcgctttcaaaacgaccgcatcggaatcctgcttgacggcggcgcgcgtttcgggcggattaacgccgatttgggcatcgccaacgccttcggcggcaatatggcaaatgcaccgctcggcggcaggattaccgcctcccttcccgacttgggcgcattgaagccctttctgcccgccgccgcgcaaaacattaccggcagcctgaatgccgccgcgcaaatcggcggacgggtaggctctccgtccgtcaatgccgccgtcaacggcagcagcaactacgggaaaatcaacggcaacatcaccgtcgggcaaagccgctctttcgataccgcgcctttgggcggcaggctcaacctgaccgttgccgatgccgaagtattccgcaacttcctaccggtcggacaaaccgtcaaaggcagcctgaatgccgccgtaaccctcggcggcagcatcgccgatccgcacttgggcggcagcatcaacggcgacaaactctattaccgcaaccaaacccaaggcatcatcttggacaacggctcgctgcgttcgcatatcgcgggcaggaaatgggtaatcgacagcctgaaattccggcacgaagggacggcggaactctccggtacggtcggtatggaaaacagcggacccgatgtcgatatcggcgcggtgttcgacaaataccgcatcctgtcccgccccaaccgccgcctgacggtttccggcaacacccgcctgcgctattcgccgcaaaaaggcatatccgttaccgggatgattaaaacggatcaggggctgttcggttcgcaaaaatcctcgatgccgtccgtcggcgacgatgtcgtcgtattaggcgaagtcaaaaaagaggcggcggcaccgctccccgtcaatatgaacctgactttagacctcaatgacggcatccgcttcgccggctacggcgcggacgttaccataggcggcaaactgaccctgaccgcccaatcgggcggaagcgtacggggcgtgggcacggtccgcgtcatcaaagggcgttataaggcatacgggcaggatttggacattaccaaaggcacggtctcctttgtcggcccgctcaacgatcccaacctcaacatccgcgccgaacgccgcctttcccccgtcggtgcgggcgtggaaatattgggcagcctcaacagcccgcgcattacgctgacggcaaacgaaccgatgagtgaaaaagacaagctctcttggctcatcctcaaccgcgccggcagcggcagcagcggcgacaatgccgccctgtctgcagccgcaggtgcgctgcttgccgggcaaatcaacgaccgcatcgggctggtggatgatttgggctttaccagcaagcgcagccgcaacgcgcaaaccggcgaactcaaccccgccgaacaggtgctgaccgtcggcaaacaactgaccggcaaactctacatcggctacgaatacagcatctccagcgcggaacagtccgtcaaactgatttaccggctgacccgcgccatacaggcggttgcccgtatcggcagccgttcgtcgggcggcgagctgacatacaccatacgtttcgaccgcttctccggttcggacaaaaaagactccgccggaaacggcaaaggaaaataagcggttttcagacggcgcgccgccaaaccggacatttgaaaacctgcttttccaccgtccgccgccgccgtccgcctgcaagggaacagaatcgatatagtgaattaacaaaaatcaggataaggcgacgaagccgcagacagtacaaatagtacggaaccgattcactcggtgcttgagcaccttagagaatcgttctctttgagccaaggcgaggcaacgccgtaccggtttttgttaatccgctatattccgccatctctaagatttacagcgatacacaggtaatttaaggaatgcccgaaccgtcattcccgccactttccgtcattcccgcgaaagcgggaatctaggacgcagggttaagaaaacctacatcccgtcattcccgcgaaagtgggaatctagaaatgaaaagcaacaggcatttatcggaaataactgaaaccgaacagactagattcccgcctgcgcgggaatgacggctgcagatgcccgacggtctttatagcggattaacaaaaatcaggataaggcgacgaagccgcagacagtacaaatagtacggaaccgattcactcggtgcttgagcaccttagagaatcgttctctttgagccaaggcgaggcaacgccgtaccggtttttgttaatccgctatattccgccatctctaagatttacagcgatacacaggtaatttaaggaatgcccgaaccgtcattcccgccactttccgtcattcccgcaaaagcgggaatctagaatctcggactttcagataatctttgaatattgctgttgttctaaggtctagattcccgcctgcgcgggaatgacgattcataagtttcccgaaattccaacataaccgaaacctgacagtaaccgtagcaactgaaccgtcattcccacgaaagtgggaatctagaaatgaaaagcaacaggcatttatcggaaataactgaaaccgaacagactagattcccgcctgcgcgggaatgacggctgcagatgcccgacggtctttatagcggattaacaaaaatcaggacaaggcggcgaagccgcagacagtacaaatagtacggaaccgattcactcggtgcttcagcaccttagagaatcgttctctttgagctaaggcgaggcaacgccgtactggtttttgttaatcctctataatgcgcccttcggcgtggcggatatataaggaagtgattttccatctaagtaaaaaccgccctatcggataagcccttaacagaaaaggctttacccgcgccgtatcggaacacatcctctaaaatacaatccgttgaattgaaaaaaatataaaaacatccgcccgcgaaaaacggcagcgcgtcgtttgacaaagaatgaaaatatcggttaaaaaccgattttcatacaaaaaacaccgctgccgtccgcatccgtttcagacggtattgagagaaaatcttttaggagaacctttatgtcccggcatcccgcccccaccggagaaaaaacattcttcggccaccccttccagctttccaccctcttccatatcgaattgtgggaacgtttttcattttacggaatgcagggcatcctgctgatttacctctactacaccgccgacaaaggcggcttgggcatagacaaaaccctcgccggcggcattgtcggcgcatacagcggcagcgtgtacctgtccaccattttgggggcgtggtttgccgaccgagtatggggtgcggaaaaaaccctcttcctctcgggcatcgtcgtgatgctcggacacatcgtccttgccgccgccccgggcctgtacggccttttaatcgggctgatattcatcgcattgggcagcggcggcgtgaaatctacggccagttctatggtgggcgcattatacgaacaggacgaaatgcgcccgctgcgcgatgcgggattttccattttctacatcgccatcaacatcggcggcttcctaggcccgctgctgaccggcctactgcaggaaaacatcggtttccattatggtttcggcgcggcggcggtcggtatggcattcggcttgtggcgttattccctgggacgtaaaaacctgccccaccccaccgtcccccatccgctttcaaaaggacagggcaaaactgcggccgccgtcggcatcgccctcatcgccgcacttgcaaccgccatcaaaaccgggcttgtcaacctcgacaatttctccggcatcctattatctaccgtcatccttgccgtcatcgcctatttcgcccgcctgctgaccaacccccgcgtcagttccgacaacaaacggcacatcatcgcctacatcccgcttttcctgaccatctgtatgttttgggccgtctggtttcagatttacaccgtggcaaccgtctatttcgacgaaaccgtcaaccgcaccatcggttcgtttaccgtgcccgtcgcttggaaagattctatgcaaagcctgtgggtcatcctgttttccggactgatggcggcaatgtggacaaaaatggggcgcaaacagcccaaaaccccgctgaaattcgctatggcggtatttgttaccggcgcgtcgtttttgggattcgtcccctttatttcctccggtacgccgatgcctattgcggttttcgcactgatcgtcctcgccatcacgataggcgaactgatgatttccccgattgcgctgtccatctccaccaaaatcgcaccgcctttattcaaaacccaaatggtcgcccttaatttccttgccttttcattaggcttcactttgggcggcgtattgtttgaaaaaggctatcaggcgggcgacgaaatcggcttctatcggctgctgttctacatcggcgcagccacaggcttcctgctgctcctgctcgtccccaaattgaacaaaatgctcgaaggcacagactaagtcccgccccgatgccgtctgaacccttcagacggcatttttccgcataatgaaaccaaaccgtttccacccgacaggacaggctcccgcccaaccggaaggcagcctgccgattgtcatttgaataacgcaagggaaagccgttgatttccgtttgtatggaaacagtttggtttcattggaaaaaggcattttgtccgactaaattagtgctgcatcaacgaaatatatagtggattaacaaaaatcaggacaaggcgacgaagccgcagacagtacaaatagtacggaaccgattcacttggtgcttgagcaccttagagaatcgttctctttgagctaaggcgaggcaacgccgtaccggtttttgttaatccactataaaaacacaacctaaataaaaatgccgtctgaaccatatttcaggtttcagacgacatttgcgtgtcggatgcacaccggacaggcggtaagccgggttctgtctcggacagtcattcctctaggcataccgttaccggtatgctcaagcaacctacccgaacgctcggcgggcagcgtcattgcgttctgtttggtcttgctccgaatggggtttggcctgccgcatattgttaccaaatgcgcggtgcgcccttaccgcaccttttcacccttacctgtgctgccaaagcagccatcggcggttttgctttctgttccactttccgtcgcgttaccgcgcccggccgttaaccggcattctaccctgcggagcccggactttcctccccgtatgccttacgcgatacgcggcgactgtctgcccgtcccgtgtgcggcgcggattataacacgaaacacaaaaatgccgtctgaaacggtacaggtttcagacggcatacagcctaaactacacgccctgtttcaggctggcttcgatgaagccgtccaagtcgccatccaatacggctttggtgttgccgacttcgtagcctgtacgcaagtctttgatacgtgaggaatccaaaacatacgaacggatttggctgccccaacctacatcggatttaccttcttccaacgcctgtttctcttcattgcgtttgcgcatttccaattcatacagtttggacttcaacatttccatcgcagcggctttgttggcgtgttgcgaacggtcgttttgacattgcaccacaatccccgtcggctcgtgggtaatgcgcacggcggagtcggttttattgatgtgctgaccgcccgcacccgatgcgcgataggtgtcgatgcgcaaatcggcggggttgatttcgatttcgatggaatcgtcgatttcagggtaaacgaacacggaggcaaacgaggtatggcgtttgttgttcgagtcaaacggcgagtaacgcaccaagcggtgaacgccggtttcggtacgcagcaaaccataagcgtattcgccttccacacggatggtggcgcggttgatgcctgcgatttcgccgtcgtcttcttcaaggatttcgattctgaagcctttgcgctcggcgtagcggctgtacatacggaacagcatacccgcccagtcttccgcttccgtaccgcccgcgcctgcggtgatgtcgataaagcagttgttcgggtcggcgggctggttgaacatccgtttgaactccaaatccgccatctgtttttccagccccgctacgtcttcctgcacggcggcaaaaccttcttcgtcgttttcttcgacggtcatttcaatcagcatgcggttgtcttcgatgcccgaagcgatgttgtcgagcgtcaacacgatgccttcgaggattttgcgctctttgccgatttcttgggcgcgtttcgggtcgttccaaagttcggggtcttcggaaagaccgataacttcttccaatcggtctttcttaccctgataatccatataaactcggatgtcttcgctgcgcttttccaaatcgttcagggtattgttgagctggttgattacttcggcttccatgattcttttgttctttcaaaattttaggggcgtattgtacgggattcgggtatttttttctatggataaagccttctggaaacacgttcagacggcatagcgtcaataacggtatgccgccagtttgcgtttgatttcaggcaatgcggcacgtgctgcctcctcacccaaccggatggcgcgttttttctgatcgaatccgccgactgcacccaaatccaaaacctgcggtttgataaccacatccgcctgccccaactcattttgcaacgcagaaacgctcattacgttcagcgtctgatcgagataagagaagaaaccttggctgatgtttttgcccggacgggcggaaatatcgacggcaatcacgaaattcgccccctgccgccgggcggcactgacgggcacgggctgcgacagaccgccgtcaacatatgtatgcctgccgatgataacgggttggaacacattgggaatggcggcggaagcgcgcacagcctgcccggcattcccctgattgaaagcgacggccttgccggtttcaaaatcagtagcaacggcggcaaatttgatgggaaactgctgaatctgcctgccgccgacttttcggttgatgtaattttgcagcttttcgcctttgataaaaccactggtggacaaggttaaatcgaccaaatcggttttgcctaaaatttcggcttccaattcgaggcggtcgggcgacatacccgatgcaaaaaggctgccgacaatcgaacctgccgatgtgccggtaaccaccttcacaggaataccgttttctttcaaaaccttaataatacctacatgggcaaatcctttagatgcgccgccaccgagtgccaaaccgaccactgcggcgggtttggcggtttgcaccggcttgcggacagcattatttcccgccgtgccgcaggcggcaagcaacgcggcggcggcgattgccaaaagcggtctgatttttgaaaacgttaccatattttccattcctttatatatcgcaccccgtcaaaaagagggattgcttttcttaacacccccctttgacagccaagcaaatgggggctttgttaagtcatcatcaaaattaatatttcttttttttttcctttacggaaattatatttgaaggcatactatccaaggcgggaattatctcacaacaccgccgttatccaaatatcccgcctttttccctttctttccatcaaaatactttctttttatattcattaacttgttaaatcattggctgccgggtgtcagtttttccgacaaaatccgtctaatggggtatcaacagaaccaaaacaggaacacttatgaaaatcggaacaacttggcagacggcatccgctatgctggttttgcgtctgtttgccgcatatgaatttttggaatcgggtttgcaaaaatggaacggggagaattggttttccgaaatcaacgatcagtttccattcccgttcaacttgctgccggacgcgttaaactggaatctcgccatgtatgcggagcttttgctgcccgtattgttgcttttgggtttggcaacgcgtctgtcggcattggggctgatggtcgttaccgccgtcgcttgggctgcggttcacgccggttcgggttacaatgtctgcgacaacggttataaaatggctttaatttatatcgtggtattaatcccgctgcttttccagggtgcgggcggatggtcgctggatacgctgctgaaaaaacggttttgcccccgatgccgtctgaaacaagattgattcagtcgtggaatctgactttaaacattccaaccttatctcgttaacttgatattttgaaaaggaaatgacatgaacaaaaacattgctgccgctctcgccggtgctttatccctgtctttggccgccggtgcagttgctgccaacaaaccggcaagcaacgcaacaggcgttcataaatccgcccatggctcttgcggcgcgtccaaatctgccgaaggttcgtgcggcgcggctggttctaaagcaggcgaaggcaaatgcggcgagggcaaatgcggtgcgaccgtaaaaaaaacccacaaacacaccaaagcatctaaagccaaggccaaatctgccgaaggcaaatgcggcgaaggcaaatgcggttctaaataatcccaccccttcaaaccaagccgcgtttttcagtaaaatgcggcttttttaacggcaaacaaagattttttaacaagcacatcattcttttgtgccatccgaaccgggtaaaaatatgattcaacacgcaggcttgggctaccgccgcgacttggcggaagactttctctcgctttccgaaaacagcccgatatgctttatcgaagccgcaccggaaaactggctgaaaatgggcggctgggcgcgcaaacagtttgaccgtgtggcggaacggctgccgctggcgttgcacggattgtctatgtcgctgggcgggcaagcaccgctggatactgatttgatagacggcatcaaagaaatgatgcgccgttacgattgcacgtttttctccgaccatttgagctactgccacgacggcggtcatctttacgatttgttgccgctgccctttaccgaggaaatggtgcatcatacggcgcggcgtatccgcgaagtgcaagaccgtttgggctgccgcatcgccgtggaaaacacgtcctactatctgcattccccgcttgccgagatgaacgaggtcgagttcctcaacgccgtcgcacgtgaggccgattgcggcattcatctggatgtgaacaatatctacgtcaacgccgtcaatcacggtctgctgtcgccggaggcttttttggaaaatgtggatgcagagcgcgtgtgctatatccatattgccggacatgacgtggaaacgccggaattgttgattgatacacatggcgcggcagttttgccgactgtttgggacttgctcgaacttgcctatgccaagctgccgacgattccgcccaccctgttggaacgcgattttaatttcccgcctttttccgaactcgaagccgaagtcgccaaaatcgccgattatcaaacgcgtgccggaaaggaatgccgccgtgcagcctgaaacctccgcccaataccagcaccgtttcgcccaagccatacgcgggggcgaagccgcagacggtctgccgcaagaccgactgaacgtctatatccgcctgatacgcaacaatatctacagctttatcgaccgttgttataccgaaacgctgcaatactttgaccgcgaagaatggggccgtctgaaagaaggtttcgtccgcgacgcgtgcgcccaaacgccctattttcaagaaatccccggcgagttcctccaatattgccaaagcctgccgcttttagacggcattttggcactgatggattttgaatatacccaattgctggcagaagttgctcaaattccggatattcccgacattcattattcaaatgacagcaaatacacaccttcccctgcggcctttatccggcaatatcgatatgatgttaccgatgatttgcatgaagcggaaacagccttgttaatatggcgaaacgccgaagatgatgtgatgtaccaaacattggacggcttcgatatgatgctgctagaaataatggggttctccgcgctttcgtttgacaccctcgcccaaacccttgtcgaatttatgcctgaggacgataattggaaaaatattttgcttgggaaatggtcaggctggactgaacaaaggattatcatcccctccttgtccgccatatccgaaaatatggaagacaattccccgggccaaaaccatctatccgcataaaattaccttgttcccgatactatgccgctacccgacctgaccgatgccgaattaatagagtcgcgtaaactgcttctgcattttgcgcggcttcagttgcccgaccaccctgatttggctgaagatttagtgcaggaaacattgctgtccgcatacagcgcaggcgacagttttcaaggcagggcacttgtcaacagctggctttttgccatattgaaaaacaaaattattgacgcattacgtcaaatcggaaggcagaggaaagtctttaccacactggatgacgagctactggatgaagcatttgaaagccatttttcccaaaacgggcattggacgcaggaagggcagccgcaacattggaacactccggaaaaatcattaaacaacaacgaattccaaaaaattctgcaaagctgcctatacaacctgcctgaaaacaccgcacgggtatttaccctgaaggaaatactcggtttttcatccgacgaaatacaacaaatgtgcggtatcagcacgtccaactaccacaccattatgcaccgcgcccgagaatcattgcgccaatgcctgcaaatcaaatggttcaaccaagaaaacccgaagtaaacgttatgaaaaaatgccgcgatatcgccctgcttctttccaaacatcaggaccgggaaaccaccccgggcgagaagatttccatatacacacacctgctgttctgtccgtattgccgtgaatataaaagacaacttcaaaccatcaaaagatcactggcaaaaacaaccagaacttcaaaataaatgccgtctgaaaaggcttcagacggcataagctgacggaaacaaatcaaaccgatttactgttatctgcagttcatccataatacacacttcaaaagcagcatatttccccatacggaatgtataaatacgcaaaatacgaaggctgcatcaatttgccatatttgctttatttgccttatttcacagacggcgctacccctcccgcccaacccgttctttctgaatgagcagatttcaatgattaaggaaaccctaatgcgcccaatcttcctatctttcgttttattccctattttgataaccgcctgcagcacaccggacaagtctgcccgatgggaaaatatcggcacaatctcaaacggcaatattcatacatatatcaataaagacagcgtgagaaaaaacggaaatctgatgattttccaagataaaaaagttgttaccaatctaaaacaagaacgttttgccaacacccccgcatacaagactgccattgccgagtgggaaatccactgcaacaacaaaacataccgcttaagttcgctacagttgtttgatacaaaaaacacggaaatttccacacaaaactacacagcctcttccctccgcccgatgagcatcctgtccgggacattaaccgaaaaacaatatgaaaccgtatgcggaaaaaaactctgattgcaacttatacacaaacttacccacaaaccttatcataaaaatgccgtctgaaatactgaaatatcagcatttcagacggcattttgccattccctgaaaattatccacaaagttatccacattattttttaaaaccggcttccatccgaaatatagtggattaacaaaaatcaggacaaggcgacgaagccgcagacagtacaaatagtacggcaaggcgaggcaacgccgtactggtttaaatttaatccactatataaactcgctatacaatttcactatccaaacgtaaattgttccattgatacacaaaactgcttacccccataattttgataaagcatttcttacattcccggctccgtcccgtaaccaacacagcggcggattcgcatttgaagtgcaactttccctaacagaaaaaggccagtatgcggtagcatacgacctttcctgcaagaaagattgccatgagctacacgcaactgacccagggcgaacgataccacatccaatacctgtcccgccactgcaccgtcaccgaaatcgccaaacagctgaaccgccacaaaagcaccatcagccgcgaaatcagacggcaccgcacccaagggcagcaatacagcgccgaaaaagcccagcggcaaagccagactatcaaacagcgtaagcgacaaccctataagctcgattcgcagctgattcagcacatcgacacccttatccgccgcaaactcagtcccgaacaagtatgcgcctacctgtgcaaacaccaccagatcacgctccaccacagcaccatttaccgctaccttcgccaagacaaaagcaacggcagcacgttgtggcaacatctcagaatatgcagcaaaccctaccgcaaacgctacggcagcacatggaccagaggcaaagtacccaaccgtgtcggcatagaaaaccgacccgctatcgtcgaccagaaatcccgtatcggcgattgggaagccgacaccattgtcggcaaaggacagaaaagcgcattattgaccttggtcgaacgcgttacccgctacaccatcatctgcaaattggatagcctcaaagccgaagacactgcccgggcagctgttagggcattaaaggcacataaagacagggtgcacaccatcaccatggataacggcaaagagttctaccaacacaccaaaataaccaaagcattgaaagcggagacttatttttgtcgcccttaccattcttgggagaaagggctgaatgagaacaccaacggactcatccggcaatacttccccaaacaaaccgatttccgtaacatcagtgatcgggagatacgcagggttcaagatgagttgaaccaccgaccaagaaaaacacttggctacgaaacgccaagtgttttattcttgaatctgttccaaccactaatacactagtgttgcacttgaaatccgaatccaagagcctctaaaaaataatcgcttgttttgacaccgatacactcatatagtggattaacaaaaatcaggacaaggcgacgaagccgcagacagtacaaatagtacggcaaggcgaggcaacgccgtactggtttaaatttaatccactatacaaatacagaaactcaagaaaataaccttgtgtattgaccatctcaagcaattcagaaaaatcaagaaattttctgaccgtaaacaaacgtttccctaaaaaaacgatgtcttcaaaaatatcgaacaaatagagacctttgcaaaaatagtctgttaacgaaatttgacgcataaaaatgcgccaaaaaattttcaattgcctaaaaccttcctaatattgagcaaaaagtaggaaaaatcagaaaagttttgcattttgaaaatgagattgagcataaaattttagtaacctatgttattgcaaaggtctcaaataatcatcttcggcgttttcatttttatggattaaaacaacacgggaaaaatctgttttcagatgcttgcccgcttgattgttcggattattgtccggaacgacaaaaccgtcctcaaaattaaagcagacgttgcgtccttctacctttatctctgtgcaataacaatcatgtagagaaatgctatccgaaaaattttttctttgtgtatgcaaaaaaagttttcattcaagtacccatatctaacgcaaacgtttacctgtttccccgtcaataatctgactcggcgatttctgcctgccgattctcccaccaacaatccacacatcgcgtccgaattgccttctgacttccctctccgtccgacacgcgcgtttgcctgcgcggttgcacgaagtcgagaccaaaggcgtttgcaaagcctgacacaagcggcgcgcacctacatgggcgggaaccctgaccgccaacttgctgcgctgtttcccgcgtaactcgggtaagacacaggatttggcggataataggaacgttttaggggcgggccattcttttctaagcatatcctgaagattttcagacggcatttgaagtaaaggctgcaattgttcaaattgattcccgatgacaatcatacccttgtgttgcggtctttttttcaaatgcgccaacttaccgagtgctttggctaatgtcggaagacaccccaagccataacaagattcggtcggataagcgaccaaaccaccttttttcaaataaacgcttaacttacgttgcgctgatgctgcgataattctcggaaataacataatataaaataccgtctgaagcacattagtcatacttggcttcagacggcatcatcctctttctaattaacggttaatcgctttatcggcaatgtctttacggtattgcatcccgtcgaaactgattttttccaacgcgccatatgccttagctttcgcttgcgccacattatcgcccaatcccacaacacacaatacgcgtccgccgttggtcaatacgtcacctttctcgtttgccgttgtacctgcatggaaaactttgccgatttggttggcagcatccagaccggaaataatatcgccttttttgggcgtttcggggtaattttgcgccgccagtaccacgcccacggcagtttgcgggctccattccgcggttacgctatcgagtttgccgtctattgccgcttcaaccaaatccgataagtcgctgttcagtcggctcataatcggctgggtttcaggatcgccgaaacggcagttaaactcaatcgtatagggtgcaccgctttgatcaatcatcaaacctgcgtacaggaaaccggtgaactcatgcccctccgctttcatccctgctacggtcggcaaaataatttcattcatcgcgcgttcgtacacaacaggcgttaccacaggcgcagggctgtacgcacccataccgcccgtattcagacctttgtcgccgtctaaaagacgcttgtggtcttggctggttgccataggcagtacattattgccatcaaccatgacgataaaactcgcttcttcgccttgcaggaaatcttcaattacaacacgcgcgccggcattgcccattttgttgtccagcagcatatcatcaatcgcagcatgcgcttcatccaaagtcatcgccacaatcacgcctttacctgccgccaaaccatcggctttgataacgataggcgcacctttctgattgacgtaatcatgtgcggcatcggcgttttcaaaggtttgatattgcgcggtcggaatattgtatttcgccataaatgctttggcgaaatctttggaactttccaactgcgccgcatattgtgtcggaccgaatatttttagtcctgcagcacggaaatcatccacaatacctgccgccaaaggcgcttcagggccgacgacggtaaaaacaatattttctttacgacagaattcaatcaaatcctgatgcgcagtcaagtcgatgttttgcaacttgggttcaatcgctgtaccggcattaccaggcgcaacaaatactgtttccactttaggcgactgcgccaatttccaagccagcgcgtgttcgcgaccgccattaccgataaccagcagtttcataccatctccttgacaaatatgtacttttaacgaaaactcgatacaaagggacttttatcccatctgaagaaattttagtagaatcaaacaaaagaccgcttcattccactctgcaacctattcaacttatccataaattaaaaaaggacaagcaaccatgcaaaaacgtattgatgaaatccaaagcaaataccgcgaatggtgtcatttactaccgcaactggaagaagacatccgccgttggaaacatgtcgtcactttaattcgcgacatggacaatttctatacccacgagtatcaggcgtgtcatcaggctattgaagacggggtagaactggatttgagtacggaaggcgaatacagcattatgagtgaagatgcgctatggaacgcgctgggcgaattccatcaattggcttggttatatttgcgctccagcgtcgatgccttagacaaatatacacaagaagattagtcagcgaagaggtcgtctgaaataccatcacaaagcatttcagacgacctttcattcaaaaggcttttccgtatttacttcaatctgccgagtattcttccaagccgcaacacaggcctcataatttaccaacgacaaactgaccgtcaatcggcaatccaactgcaaatcccgctccaatatatccgcctgatattgtttggcaatgcgtatcgcttcattcaaaaacggatattcacatttcagccaaacagttttttcaatattcttttcaactacttctgcaactgccaacgcttgagccgtcgcctctttgtacgcatgtatcagacctggaacacctaacaaagtaccaccgaaatagcggacgaccacaaccaaaacgtcggtaatacccaccgaatcaatctgtcccaaaattggtcgtccagcacttcctgatggctctccatcatcgttggcacgaaattgcacaccatccacacccaaacgataggcatagcaccagtgtcgtgctttatgatgctcttcctttaacggatcgaggtattttttcacatcagccaatgtccgaatcggataggcaaatgcaataaaacggctgcctttatctttaaactcagcctgcgtcaaggaagtaatggttttataagtcgtaatcatgctgaaatgttttcagacgacctcattaataacaaggtcgtctgaaagtttcacgtgaaacatcaatttttcaatacttctgttaattgtggaacgatttcaaataaatcgccaaccaatccgtaatcggctacattgaaaatcggcgcatcagcatctttattgattgcaacaatcaccttactgtcttgcataccggcaacgtgttgaattgcacctgaaataccgattgcaaaatagagttgcggcgcaaccactttaccggtttgtccgacttgagcatcgtttggcgcatattcggcatcaactgctgcacgggatgcaccgattgccgcacctaaaacatccgccaacggtgtcagcacttcattgaatttttccgcactacccaacgcacgaccaccggaaacaatcacttttgcctgagtcagttcaggacgatcggaatgggaaagctgacggttaacaaaacgactcaggttttgggcaggggttgcttcaacattaattacctcagcattaccaccttgcgccgccactgcgtcaaaaaccgtcgcacggaaggtcagcaccaatttttctgaatcagcttgcacggtttcaaatgcattacccgcataaatggggcgcacaaaagtcgtgttatccacaatttcggtcaaatcagaaatttgcggtacgtctaataaggctgctacgcggggcaaaaggtttttaccgaatgtggttgccgttgctgcaacatagcggtaatcggccgccaatttaacaaccagcggagccaactcttcagccaaaccttcggcataatgagcagcatctgcaaccaaaacttttttcacccccgctacttgcttcgcgaattccactacagcagatgcgccgtttccggcaaccaataaatcgactttgcccagtttggcggcagcggtaacagcatgcaaagtggtaggattcaactgtttgttgtcgtgttcgacaataatcaatacactcatttcagcctcctcaaatcactttggcttcgtttttcaatttttcaaccaattcggcaacgcttgctacttttacgcctgcctgacgcgccttaggttcggcaaatttcaccgttttcaaacgaggtgaaatgtcggcaaccaaatcgtcaggagtcagtttttccaaaggttttttctttgccgccataatattggggagtttgacaaagcgcggctcgttcaaacgcaaatccgcgctgataacagcaggcagtttcaatgcgatggtttcttcgccgccatcgatttcccgcacaatctgcacttcgtcgccttcaatttgtactttggacgcgaacgtaccttgcgccgcattcagcaaagctgccagcatttgcgccacttgattggcatcatcatcaatcgcttgtttgcccaaaaagaaaatttgcggattttctttgtccgcaacggctttcagcaacttagcaacggccagagactccagtttagtatcggtttcaacatgaatggcacggtcggcacccatcgccaaagctgtacgcaaggtttcttcgcattttttctcacccaaagaaaccgctacgatttcgcttacttttccggcttctttcaaacggacagcttcttccacagcgatttcgtcaaacggattcatcgacattttgacattgccgatatccacatccgaaccatcggcttttacacgaactttgacgttgtagtccactacgcgctttactgcgaccagtgctttcattgaaccctcctaaaaagaacgctgctttcaccatccagcgaaaccaaaccttcttccctataaaaccaaatccgttttccttaaaaacgaattcattcaaaaatctttcggataatgcttgccgattataccatttttaaagcatttactcagactagcggatatacattcctgtatctaataaattggaaaatatcatgccgccatatcagttttagacgaccctttagcctttatctgctgcaacacaatccatcagcgcttgataaaccaaatctgcggtcggaatctgcccgatattgcccaaattttttgcaattggcgaaacctgaacgcctgttttaatcggatcggtatcggtataaatgccgaccacaggtttttccaaggcatttgccaaatgcagcaaaccggtatccacgccgacaattccgaccgcgtatttcagcagatacgctgcctgcaataaatttattttgtcgcacacaatagcaaacggcagcccatctgcaatttgtttggcacgcgttttttcatcttcatttccccaaggcaggtaaatattgcattgctgttcttcattcaacttttgcagcaacgaccgccagttttccacaggccataacttactgtcccgactggtcgcatgcaaagccgcataatacggctgcgctaaatttttcagacggcctgcttcaggaacagtcaagccaaatacctgcgtttccggcattacatacccaaatacttgggcaaacagttcacggttgcgccaaacggcattttttcccttcggtacagcgtatgtttttacatacgccaaagcagcccatccctcgcgcgcactgtttttatccaaaccacaaatcggggattttgccattttagcgaaacacgcgcttttaatcagaccttgactgtccaatacgaaatcaaatacttcctgccgcaaagtctgtttcagatgacccatttcccgccaagtttcagcccgaaagagatgtttgcgccattgccgccatttcatcacatggattttttttacaaacggatgcaggcgcgcaatatctgcaaatccagcctcacatagccaatgcagttctacatcaggacattgtcgcgccaaatcttcgattgcgggcaaagtgtgaattaaatcgcccatactagacaagcggacaagcaaaattttcatatttaggaagggggtttcacgtgaaacaattttaacttattgattattaatatatttatttatttcatcagcgttttttaagatgattgccccagcagaatgcatttcctgccatgctgtttcgatggtttccggcgcaataccccgacaagccgcttcattgacgacaacctgccaacgaccgcctttgagtaactgcaaaaccgttgttttaacacaataatccgtagctaacccaccgataataaccgtatccgtattttgacaacgcagccattcaatcagccctgtgcttagtttttcctcaatatcgtgaaaacacgcgccgtaaggatgcaattcaggatcaacacctttccaaacgcaataatcgtattctttagcagaaggcagcccgtccaataattcatagccgcgcgtaccgaccatcgcatgagccacccaagtcaaatccgcatcaggcaaacctgtcggcttcaacatatcaacagggttatccacaagccatttcgctaccatatgatgcgcatctttcgtcatcacgcgcaaatccgccaaagcggcttgcgcattcaactcctcgacaatcaaatgcccctcgttcacgggcagttcgtcaggacacagtggcgtaaacgttttttgtgcatcaacatcaatggaaacaatcatctcattatttcaacgcgattaaaatgccctgtattataacaaattactgcccaaaagcggtaaaaccgattgtgataagataaggtttttccaaaaaacttatccacaaccttatgacttataccattacccccatcggcaccgcccgctcgccctacaaacagaaattcggcatcgcccgccagcccggtttggtctccgccgcaaaagcctgcatcgagctgaatcccaaattcaccgcagacagcgtgcgcgggctggaagatttcgattatgtgtggataagttttatttttcacggcgtattggatgaaggctgggcgcaaatggtgcgcccgccacggctcggcggcaaacaaaaaatgggcgtgttcgccacgcgcagcccccaccgccccaaccatctcggactctcgctcctgaaactcgaacgcatcgaaaccggcaaacccgtccgcctctattgcagcggcgcagacctgctggacggcacaccgattgtggacatcaaaccttatatcccctttgtcgaatccaaacccgatgccgcatccggtttcgtcagcggcaaacccgtagagttggaagtcgtttggcaggaaaacatcggcgcggaaaatttatctgcaaacaccaaaaaccttatcagccaaagcattgcccaagatccgcgccccgcctatcagaatattcccgaacggatttatgtgatgaatattgcagattacgaagtcagatttcaaatcgaggaaaaccgtgcaaccgttattgatctttccccaaccccgctttaaatcgggcaaaaatccggttttgccgcatagcagttgaacaaacggctgttgtttgttcgccataagccgcaatatcaagttatagcggattaaatttaaatcaggacaaggcaacgaagccgcagacagtacaaatagtacggcaaggcgagataacgccgtactggtttaaatttaatccactatacagataaacaatgccgtctgaacgcaatgtgttcagacggcatttacttatccacaggtttgttcaagccttagattttgcctgcgaagtattccaaagtgcggacgagttggcaggtgtaggacatttcgttgtcgtaccaggcaacggttttcaccaattgtttgccgcccacggtcatcacgcgggtttgggtcgcatcgaagagcgagccgtattcgatgccgacaacgtcggaagaaacgatttgatcttcgttgtagccgtaagattcgctggcggcggctttcatcgcggcgttgatttcttctttggttacagggcgttcgaggatggaaaccaattcggtcagcgagccgctggcaacagggacgcgttgggcggagccgtcgagtttgccgttcaattcggggataaccagaccgatggccttggcggcaccggtgctgttgggcacgatgttgagcgcggcggctcgggcgcggcgcaaatcgcctttgcggtgcggcgcgtcaagggtgttttggtcgccggtgtaggcgtggatggtggtcatcagaccttcgactacgccgaactctttttgcaggactgccgccatcggggcaaggcagttggtggtgcaggaagcggcggagataacggtttcgctgccgtccaaaatgtcttggtttacgccatatacgacggttttcacatcattgccgccgggtgcggaaatcacgactttgcgcgcgccggccctgatgtgtgcttcggctttggttttattggtaaagaagccggtacattcgaggatgacatccacacccaactcgccccaaggcaattcttcgggattcggattggcaaaaactttgatctctttgccgtttaccacgatggcatcgtcttttaattcggcagtaccttggaaacggccttgtgtgctgtcgtatttgaaaaggtgcagcagcatttcggcaggggtcaggtcgttgacggcgacgacttcgatgtcgtgggctttttcaatttgacgcaatgcgaggcggccgatgcggccgaaaccgttaatcgctactttaatgctcatgtatatactccaagctgtgaaacgaaatttcaatacctgtattgtattctgaaataaagttacattccactattacatctaactacttgccgcttatttgatatagatgaattttactgtttgcacagatttccaaaacttttaccatcaatatttgaatttaaaattttaatgatgattttgatgattgccaacctgcttgtgcgtaagtagcaaatatccaatattttcattacctttttgtcaaataagtttgagtttaagacttgctgtataagacagataagcgtggatgttttttgacttaataatatttctgtggataactttgctgttttcctagttgtctccacaaccttattgacaggcttacggtcagtctcattccgtcgaagacaaaaccttttgctacaataccgttttcctaatgataaggcagccccatgtccaaatccgccgtttccccaatgatgcagcaatacctcggcatcaaagcgcaacataccgacaaactggtgttttaccgtatgggcgatttttacgagatgtttttcgacgatgcggtagaagcggcaaaacttttggatattaccctgaccacgcgcggacaggtggatggcgagccggtcaaaatggcaggcgtgccgtttcacgccgccgaacaatatctggcgcgcctggtcaagttgggcaaaagcgtggcgatttgcgaacaggtcggcgaagtcggcgcgggcaaagggcctgtggagcgcaaagtcgtgcgcatcgtaacgcccggcacgctgaccgattccgcattgctggaagacaaggaaaccaaccgcatcgttgccgtgtcccccgacaaaaaatacatcggtttggcgtgggcatcgctgcaaagcggcgaattcaaaaccaagctgacaactgtggataaattggacgacgaactggcgcgcctgcaggcggcggaaattctgttgcctgacagtaaaaacgcaccgcaacttcagacggcatcgggtgttacgcgcctgaacgcgtggcagtttgccgccgacgcgggggaaaaactgctgacggaatatttcggctgccaggatttgcgcggcttcggtttggacggcaaagaacacgccgttgcgattggcgcggcaggtgcactgttgaactatatccgtctgacgcaaaacctgatgccgcaacatttggacggcctgtcgctcgaaaccgacagccaatatatcggtatggatgccgccacgcgccgcaatctcgaaatcacgcaaaccctctccggcaaaaaatcgccgaccctgatgtccacgctcgacctttgcgctacccatatgggcagccgcctcttggctctctggctgcaccaccctttacgcaaccgcgcccacatccgagcgcgccaagaagccgttgccgcgctggaaagccaatacaaacccctccagtgccgtctgaaaagcattgccgacatcgaacgcatcgccgcccgtattgccgtgggtaacgcccgcccgcgcgacctcgccgccctgcgcgacagcctgtttgccctgtccgaaatcgaattgtccgccgagtgcagcagtctcttaggaaccctcaaagccgttttcccggaaaacctatccacagccgaacagctccgccaagccattttgcccgaaccttccgtctggctgaaagacggcaatgtcatcaaccacggttttcatcccgaactggacgaattgcgccgcattcaaaaccatggcgacgaatttttgctggatttggaagccaaggaacgcgaacgtaccggtttgtccacacttaaagtcgagttcaaccgcgttcacggcttttacattgaattgtccaaaacccaagccgaacaagcacctgccgactaccaacgccggcaaacccttaaaaacgccgaacgcttcatcacgccggaactgaaagcctttgaagacaaagtgctgactgctcaagagcaagccctcgccttagaaaaacaactctttgacggcgtattgaaaaaccttcagacggcattgccgcagcttcaaaaagccgccaaagccgccgccgcgctggacgtgttgtccacattttcagccttggcaaaagagcggaacttcgtccgccccgagtttgccgactatccggttatccacatcgaaaacggccgccatcccgttgtcgaacagcaggtacgccacttcaccgccaaccacaccgaccttgaccacaaacaccgcctcatgctgctcaccggccccaatatgggcggcaaatccacctacatgcgccaagtcgcgctgattgttttattggcacacaccggctgttttgtgcctgccgatgccgccacaatcgggcccatcgatcaaatcttcacccgcatcggcgcatcggacgacctcgcctccaaccgctccactttcatggtcgaaatgagcgaaaccgcctacatcctgcatcacgccaccgaacaaagccttgttttaatggacgaagtcggacgtggtacttccactttcgacggcctcgccctcgcgcacgccgttgccgaacacctgctgcaaaaaaacaaatccttcagcctgtttgctacccactatttcgagctgacctacctgcccgaagcccacaccgccgccgtcaatatgcacctttccgcgctcgaacagggacaggacatcgttttcctgcaccaaatccaaccgggtcccgccggtaaaagctacggcattgccgtcgccaaactcgccggcctgcctgtacgcgcattgaaatccgcccaaaagcatttgaacggactggaaaaccaagccgccgcgaaccgtccccaactggatattttcagtaccatgccgtctgaaaaaggagatgaaccgaatgtgggcaactttgtggataaagcagaggaaaaacattttgaaggtatattggcagcagccttggaaaaactcgatcccgacagcctgaccccgcgcgaagcattgtcagaactgtaccgtctgaaagatttgtgcaaatccgtatcttaatttccgttgtcggaacagcatcaaaccatatggaaaaatctgtggataaacattatctgacaggaaatttccaaacataaaaaatgccgtccgaacagctcagacggcatccgtccattcggct

SEQ ID NO: 2 - DNA, 459 bp, Neisseria meningitidis
ataacgcggatttgcggctgcttgatttcaacggttttcagggcttcggcaagtttgtcggcggcgggtttcatcaggctgcaatgggaaggtacggacacgggcagcggcagggcgcgtttggcaccggcttctttggcggcagccatggcgcgtccgacggcggcggcgttgcctgcaatcacgatttgtccgggtgagttgaagttgacggcttcgaccacttcgctttgggcggcttcggcacaaatggctttaacctgctcatcttccaagccgagaatcgccgccattgcgcccacgccttgcggtacggcggactgcatcagttcggcgcgcaggcgcacgagtttgaccgcgtcggcaaaattcaatgcgccggcggcaacgagtgcggtgtattcgccgaggctgtgtccggcaacggcggcaggcgttttgccgcccgcttctaaatag

SEQ ID NO: 3 - protein, 152 aa, Neisseria meningitidis
ITRICGCLISTVFRASASLSAAGFIRLQWEGTDTGSGRARLAPASLAAAMARPTAAALPAITICPGELKLTASTTSLWAASAQMALTCSSSKPRIAAIAPTPCGTADCISSARRRTSLTASAKFNAPAATSAVYSPRLCPATAAGVLPPASK

SEQ ID NO: 4 - DNA, 459 bp, Neisseria gonorrhoeae
atgacgcggatttgcggctgcttgatttcaacggttttgagtgtttcggcaagtttgtcggcggcgggtttcatcaggctgcaatgggaaggaacggataccggcagcggcagggcgcgtttggctccggcttctttggcggcagccatggtgcgtccgacggcggcggcgttgcctgcaatcacgacttgtccgggcgagttgaagttgacggcttcgaccacttcgccctgtgcggattcggcacaaatctgcctgacctgttcatcttccaaacccaaaatggccgccattgcgcctacgccttgcggtacggcggactgcatcagttcggcgcgcaggcggacgagtttgacggcatcggcaaaatccaatgcttcggcggcgacaagcgcggtgtattcgccgaggctgtgtccggcaacggcggcaggcgttttgccgcccacttccaaatag

SEQ ID NO: 5 - protein, 152 aa, Neisseria gonorrhoeae
MTRICGCLISTVLSVSASLSAAGFIRLQWEGTDTGSGRARLAPASLAAAMVRPTAAALPAITTCPGELKLTASTTSPCADSAQICLTCSSSKPKMAAIAPTPCGTADCISSARRRTSLTASAKSNASAATSAVYSPRLCPATAAGVLPPTSK

SEQ ID NO: 6 - DNA, 459 bp, Neisseria meningitidis
  misc_feature 6, 8, 38, 39, 96, 102, 341, 390, 410: n = A,T,C or G
atgacncngatttgcggctgcttgatttcaacggtttnnagggcttcggcgagtttgtcggcggcgggtttcatgaggctgcaatgggaaggtacngacacnggcagcggcagggcgcgtttggcgccggcttctttggcggcaagcatagcgcgctcgacggcggcggcattgcctgcaatcacgacttgtccgggcgagttgaagttgacggcttcaaccacttcatcctgtgcggattcggcgcaaatttgttttacctgttcatcttccaagccgagaatcgccgccattgcgcccacgccttgcggtacggcggactgcatcagttcggcgcgcangcgcacgagtttgaccgcgtcggcaaaatccaatgcgccggcggcaacnagtgcggtgtattcgccgangctgtgtccggcaacggcggcaggcgttttgccgcccgcttccgaatag

SEQ ID NO: 7 - protein, 152 aa, Neisseria meningitidis
  VARIANT 3, 13, 114, 137: Xaa = Any Amino Acid
MTXICGCLISTVXRASASLSAAGFMRLQWEGTDTGSGRARLAPASLAASIARSTAAALPAITTCPGELKLTASTTSSCADSAQICFTCSSSKPRIAAIAPTPCGTADCISSARXRTSLTASAKSNAPAATSAVYSPXLCPATAAGVLPPASE

SEQ ID NO: 8 - DNA, 600 bp, Neisseria meningitidis
tccgttatcgggcgtatggagttggacaaaacgtttgaagaacgcgacgaaatcaacagtactgttgttgcggctttggacgaggcggccggggcttggggtgtgaaggttttgcgttatgagattaaagacttggttccgccgcaagaaatccttcgctcaatgcaggcgcaaattactgccgaacgcgaaaaacgcgcccgtatcgccgaatccgaaggtcgtaaaatcgaacaaatcaaccttgccagtggtcagcgcgaagccgaaatccaacaatccgaaggcgaggctcaggctgcggtcaatgcgtcaaatgccgagaaaatcgcccgcatcaaccgcgccaaaggtgaagcggaatccttgcgccttgttgccgaagccaatgccgaagccatccgtcaaattgccgccgcccttcaaacccaaggcggtgcggatgcggtcaatctgaagattgcggaacaatacgtcgctgcgttcaacaatcttgccaaagaaagcaatacgctgattatgcccgccaatgttgccgacatcggcagcctgatttctgccggtatgaaaattatcgacagcagcaaaaccgccaaataa

SEQ ID NO: 9 - protein, 199 aa, Neisseria meningitidis
SVIGRMELDKTFEERDEINSTVVAALDEAAGAWGVKVLRYEIKDLVPPQEILRSMQAQITAEREKRARIAESEGRKIEQINLASGQREAEIQQSEGEAQAAVNASNAEKIARINRAKGEAESLRLVAEANAEAIRQIAAALQTQGGADAVNLKIAEQYVAAFNNLAKESNTLIMPANVADIGSLISAGMKIIDSSKTAK

SEQ ID NO: 10 - DNA, 951 bp, Neisseria gonorrhoeae
atggaatttttcattatcttgttggcagccgtcgccgttttcggcttcaaatcctttgtcgtcatcccccagcaggaagtccacgttgtcgaaaggctcgggcgtttccatcgcgccctgacggccggtttgaatattttgattccctttatcgaccgcgtcgcctaccgccattcgctgaaagaaatccctttagacgtacccagccaggtctgcatcacgcgcgataatacgcaattgactgttgacggcatcatctatttccaagtaaccgatcccaaactcgcctcatacggttcgagcaactacattatggcaattacccagcttgcccaaacgacgctgcgttccgttatcgggcgtatggagttggacaaaacgtttgaagaacgcgacgaaatcaacagtaccgtcgtctccgccctcgatgaagccgccggggcttggggtgtgaaagtcctccgttacgaaatcaaggatttggttccgccgcaagaaatccttcgcgcaatgcaggcacaaattaccgccgaacgcgaaaaacgcgcccgtattgccgaatccgaaggccgtaaaatcgaacaaatcaaccttgccagtggtcagcgtgaagccgaaatccaacaatccgaaggcgaggctcaggctgcggtcaatgcgtccaatgccgagaaaatcgcccgcatcaaccgcgccaaaggcgaagcggaatccctgcgccttgttgccgaagccaatgccgaagccaaccgtcaaattgccgccgcccttcaaacccaaagcggggcggatgcggtcaatctgaagattgcgggacaatacgttaccgcgttcaaaaatcttgccaaagaagacaatacgcggattaagcccgccaaggttgccgaaatcgggaaccctaattttcggcggcatgaaaaattttcgccagaagcaaaaacggccaaataa

SEQ ID NO: 11 - protein, 316 aa, Neisseria gonorrhoeae
MEFFIILLAAVAVFGFKSFVVIPQQEVHVVERLGRFHRALTAGLNILIPFIDRVAYRHSLKEIPLDVPSQVCITRDNTQLTVDGIIYFQVTDPKLASYGSSNYIMAITQLAQTTLRSVIGRMELDKTFEERDEINSTVVSALDEAAGAWGVKVLRYEIKDLVPPQEILRAMQAQITAEREKRARIAESEGRKIEQINLASGQREAEIQQSEGEAQAAVNASNAEKIARINRAKGEAESLRLVAEANAEANRQIAAALQTQSGADAVNLKIAGQYVTAFKNLAKEDNTRIKPAKVAEIGNPNFRRHEKFSPEAKTAK

SEQ ID NO: 12 - DNA, 948 bp, Neisseria meningitidis
atggaatttttcattatcttgctggcagccgtcgttgttttcggcttcaaatcctttgttgtcatcccacagcaggaagtccacgttgtcgaaaggctcgggcgtttccatcgcgccctgacggccggtttgaatattttgattccctttatcgaccgcgtcgcctaccgccattcgctgaaagaaatccctttagacgtacccagccaggtctgcatcacgcgcgacaatacgcagctgactgttgacggtatcatctatttccaagtaaccgaccccaaactcgcctcatacggttcgagcaactacattatggcgattacccagcttgcccaaacgacgctgcgttccgttatcgggcgtatggaattggacaaaacgtttgaagaacgcgacgaaatcaacagcaccgtcgtctccgccctcgatgaagccgccggagcttggggtgtgaaggttttgcgttatgagattaaagacttggttccgccgcaagaaatccttcgctcaatgcaggcgcaaattactgctgaacgcgaaaaacgcgcccgtatcgccgaatccgaaggtcgtaaaatcgaacaaatcaaccttgccagtggtcagcgcgaagccgaaatccaacaatccgaaggcgaggctcaggctgcggtcaatgcgtcaaatgccgagaaaatcgcccgcatcaaccgcgccaaaggtgaagcggaatccttgcgccttgttgccgaagccaatgccgaagccatccgtcaaattgccgccgcccttcaaacccaaggcggtgcggatgcggtcaatctgaagattgcggaacaatacgtcgccgcgttcaacaatcttgccaaagaaagcaatacgctgattatgcccgccaatgttgccgacatcggcagcctgatttctgccggtatgaaaattatcgacagcagcaaaaccgccaaataa

SEQ ID NO: 13 - protein, 315 aa, Neisseria meningitidis
MEFFIILLAAVVVFGFKSFVVIPQQEVHVVERLGRFHRALTAGLNILIPFIDRVAYRHSLKEIPLDVPSQVCITRDNTQLTVDGIIYFQVTDPKLASYGSSNYIMAITQLAQTTLRSVIGRMELDKTFEERDEINSTVVSALDEAAGAWGVKVLRYEIKDLVPPQEILRSMQAQITAEREKRARIAESEGRKIEQINLASGQREAEIQQSEGEAQAAVNASNAEKIARINRAKGEAESLRLVAEANAEAIRQIAAALQTQGGADAVNLKIAEQYVAAFNNLAKESNTLIMPANVADIGSLISAGMKIIDSSKTAK

SEQ ID NO: 14 - DNA, 948 bp, Neisseria meningitidis
atggaatttttcattatcttgttggtagccgtcgccgttttcggtttcaaatcctttgttgtcatcccacaacaggaagtccacgttgtcgaaaggctggggcgtttccatcgcgccctgacggccggtttgaatattttgattccctttatcgaccgcgtcgcctaccgccattcgctgaaagaaatccctttagacgtacccagccaggtctgcatcacgcgcgacaatacgcagctgactgttgacggcatcatctatttccaagtaaccgaccccaaactcgcctcatacggttcgagcaactacattatggcgattacccagcttgcccaaacgacgctgcgttccgttatcgggcgtatggagttggacaaaacgtttgaagaacgcgacgaaatcaacagtactgttgttgcggctttggacgaggcggccggggcttggggtgtgaaggttttgcgttatgagattaaagacttggttccgccgcaagaaatccttcgctcaatgcaggcgcaaattactgccgaacgcgaaaaacgcgcccgtatcgccgaatccgaaggtcgtaaaatcgaacaaatcaaccttgccagtggtcagcgcgaagccgaaatccaacaatccgaaggcgaggctcaggctgcggtcaatgcgtcaaatgccgagaaaatcgcccgcatcaaccgcgccaaaggtgaagcggaatccttgcgccttgttgccgaagccaatgccgaagccatccgtcaaattgccgccgcccttcaaacccaaggcggtgcggatgcggtcaatctgaagattgcggaacaatacgtcgctgcgttcaacaatcttgccaaagaaagcaatacgctgattatgcccgccaatgttgccgacatcggcagcctgatttctgccggtatgaaaattatcgacagcagcaaaaccgccaaataa

SEQ ID NO: 15 - protein, 315 aa, Neisseria meningitidis
MEFFIILLVAVAVFGFKSFVVIPQQEVHVVERLGRFHRALTAGLNILIPFIDRVAYRHSLKEIPLDVPSQVCITRDNTQLTVDGIIYFQVTDPKLASYGSSNYIMAITQLAQTTLRSVIGRMELDKTFEERDEINSTVVAALDEAAGAWGVKVLRYEIKDLVPPQEILRSMQAQITAEREKRARIAESEGRKIEQINLASGQREAEIQQSEGEAQAAVNASNAEKIARINRAKGEAESLRLVAEANAEAIRQIAAALQTQGGADAVNLKIAEQYVAAFNNLAKESNTLIMPANVADIGSLISAGMKIIDSSKTAK

SEQ ID NO: 16 - DNA, 948 bp, Neisseria gonorrhoeae
atggaatttttcattatcttgttggcagccgtcgccgttttcggcttcaaatcctttgtcgtcatcccccagcaggaagtccacgttgtcgaaaggctcgggcgtttccatcgcgccctgacggccggtttgaatattttgattccctttatcgaccgcgtcgcctaccgccattcgctgaaagaaatccctttagacgtacccagccaggtctgcatcacgcgcgataatacgcaattgactgttgacggcatcatctatttccaagtaaccgatcccaaactcgcctcatacggttcgagcaactacattatggcaattacccagcttgcccaaacgacgctgcgttccgttatcgggcgtatggagttggacaaaacgtttgaagaacgcgacgaaatcaacagtaccgtcgtctccgccctcgatgaagccgccggggcttggggtgtgaaagtcctccgttacgaaatcaaggatttggttccgccgcaagaaatccttcgcgcaatgcaggcacaaattaccgccgaacgcgaaaaacgcgcccgtattgccgaatccgaaggccgtaaaatcgaacaaatcaaccttgccagtggtcagcgtgaagccgaaatccaacaatccgaaggcgaggctcaggctgcggtcaatgcgtccaatgccgagaaaatcgcccgcatcaaccgcgccaaaggcgaagcggaatccctgcgccttgttgccgaagccaatgccgaagccatccgtcaaattgccgccgcccttcaaacccaaggcggggcggatgcggtcaatctgaagattgcggaacaatacgtagccgcgttcaacaatcttgccaaagaaagcaatacgctgattatgcccgccaatgttgccgacatcggcagcctgatttctgccggcatgaaaattatcgacagcagcaaaaccgccaaataa

SEQ ID NO: 17 - protein, 315 aa, Neisseria gonorrhoeae
MEFFIILLAAVAVFGFKSFVVIPQQEVHVVERLGRFHRALTAGLNILIPFIDRVAYRHSLKEIPLDVPSQVCITRDNTQLTVDGIIYFQVTDPKLASYGSSNYIMAITQLAQTTLRSVIGRMELDKTFEERDEINSTVVSALDEAAGAWGVKVLRYEIKDLVPPQEILRAMQAQITAEREKRARIAESEGRKIEQINLASGQREAEIQQSEGEAQAAVNASNAEKIARINRAKGEAESLRLVAEANAEAIRQIAAALQTQGGADAVNLKIAEQYVAAFNNLAKESNTLIMPANVADIGSLISAGMKIIDSSKTAK

SEQ ID NO: 18 - DNA, 948 bp, Neisseria meningitidis; identical to SEQ ID NO: 12

SEQ ID NO: 19 - protein, 315 aa, Neisseria meningitidis; identical to SEQ ID NO: 13

SEQ ID NO: 20 - DNA, 669 bp, Neisseria meningitidis
atgcagcaggcaagctatgcgatgggcgtggacatcggacgctccctgaagcaaatgaaggaacagggcgcggaaatcgatttgaaagtctttaccgaagccatgcaggcagtgtatgacggcaaagaaatcaaaatgaccgaagagcaggctcaggaagtcatgatgaaattccttcaggaacaacaggctaaagccgtagaaaaacacaaggcggacgcgaaggccaataaagaaaaaggcgaagcctttctgaaagaaaatgccgccaaagacggcgtgaagaccactgcttccggcctgcaatacaaaatcaccaaacagggcgaaggcaaacagccgaccaaagacgacatcgttaccgtggaatacgaaggccgcctgattgacggtacggtattcgacagcagcaaagccaacggcggcccggtcaccttccctttgagccaagtgattccgggttggaccgaaggcgtacagcttctgaaagaaggcggcgaagccacgttctacatcccgtccaaccttgcctaccgcgaacagggtgcgggcgacaaaatcggtccgaacgccactttggtatttgatgtgaaactggtcaaaatcggcgcacccgaaaacgcgcccgccaagcagccggctcaagtcgacatcaaaaaagtaaattaa

SEQ ID NO: 21 - protein, 222 aa, Neisseria meningitidis
MQQASYAMGVDIGRSLKQMKEQGAEIDLKVFTEAMQAVYDGKEIKMTEEQAQEVMMKFLQEQQAKAVEKHKADAKANKEKGEAFLKENAAKDGVKTTASGLQYKITKQGEGKQPTKDDIVTVEYEGRLIDGTVFDSSKANGGPVTFPLSQVIPGWTEGVQLLKEGGEATFYIPSNLAYREQGAGDKIGPNATLVFDVKLVKIGAPENAPAKQPAQVDIKKVN

SEQ ID NO: 22 - DNA, 648 bp, Neisseria gonorrhoeae
atgggcgtggacatcggacgctccctgaaacaaatgaaggaacagggcgcggaaatcgatttgaaagtctttaccgatgccatgcaggcagtgtatgacggcaaagaaatcaaaatgaccgaagagcaggcccaggaagtgatgatgaaattcctgcaggagcagcaggctaaagccgtagaaaaacacaaggcggatgcgaaggccaacaaagaaaaaggcgaagccttcctgaaggaaaatgccgccgaagacggcgtgaagaccactgcttccggtctgcagtacaaaatcaccaaacagggtgaaggcaaacagccgacaaaagacgacatcgttaccgtggaatacgaaggccgcctgattgacggtaccgtattcgacagcagcaaagccaacggcggcccggccaccttccctttgagccaagtgattccgggttggaccgaaggcgtacggcttctgaaagaaggcggcgaagccacgttctacatcccgtccaaccttgcctaccgcgaacagggtgcgggcgaaaaaatcggtccgaacgccactttggtatttgacgtgaaactggtcaaaatcggcgcacccgaaaacgcgcccgccaagcagccggatcaagtcgacatcaaaaaagtaaattaa

SEQ ID NO: 23 - protein, 215 aa, Neisseria gonorrhoeae
MGVDIGRSLKQMKEQGAEIDLKVFTDAMQAVYDGKEIKMTEEQAQEVMMKFLQEQQAKAVEKHKADAKANKEKGEAFLKENAAEDGVKTTASGLQYKITKQGEGKQPTKDDIVTVEYEGRLIDGTVFDSSKANGGPATFPLSQVIPGWTEGVRLLKEGGEATFYIPSNLAYREQGAGEKIGPNATLVFDVKLVKIGAPENAPAKQPDQVDIKKVN

SEQ ID NO: 24 - DNA, 819 bp, Neisseria meningitidis
atgaacaccattttcaaaatcagcgcactgaccctttccgccgctttggcactttccgcctgcggcaaaaaagaagccgcccccgcatctgcatccgaacctgccgccgcttcttccgcgcagggcgacacctcttcgatcggcagcacgatgcagcaggcaagctatgcgatgggcgtggacatcggacgctccctgaagcaaatgaaggaacagggcgcggaaatcgatttgaaagtctttaccgaagccatgcaggcagtgtatgacggcaaagaaatcaaaatgaccgaagagcaggctcaggaagtcatgatgaaattccttcaggaacaacaggctaaagccgtagaaaaacacaaggcggacgcgaaggccaataaagaaaaaggcgaagcctttctgaaagaaaatgccgccaaagacggcgtgaagaccactgcttccggcctgcaatacaaaatcaccaaacagggcgaaggcaaacagccgaccaaagacgacatcgttaccgtggaatacgaaggccgcctgattgacggtacggtattcgacagcagcaaagccaacggcggcccggtcaccttccctttgagccaagtgattctgggttggaccgaaggcgtacagcttctgaaagaaggcggcgaagccacgttctacatcccgtccaaccttgcctaccgcgaacagggtgcgggcgacaaaatcggcccgaacgccactttggtatttgatgtgaaactggtcaaaatcggcgcacccgaaaacgcgcccgccaagcagccggctcaagtcgacatcaaaaaagtaaattaa

SEQ ID NO: 25 - protein, 272 aa, Neisseria meningitidis
MNTIFKISALTLSAALALSACGKKEAAPASASEPAAASSAQGDTSSIGSTMQQASYAMGVDIGRSLKQMKEQGAEIDLKVFTEAMQAVYDGKEIKMTEEQAQEVMMKFLQEQQAKAVEKHKADAKANKEKGEAFLKENAAKDGVKTTASGLQYKITKQGEGKQPTKDDIVTVEYEGRLIDGTVFDSSKANGGPVTFPLSQVILGWTEGVQLLKEGGEATFYIPSNLAYREQGAGDKIGPNATLVFDVKLVKIGAPENAPAKQPAQVDIKKVN

SEQ ID NO: 26 - DNA, 819 bp, Neisseria meningitidis
atgaacaccattttcaaaatcagcgcactgaccctttccgccgctttggcactttccgcctgcggcaaaaaagaagccgcccccgcatctgcatccgaacctgccgccgcttcttccgcgcagggcgacacctcttcgatcggcagcacgatgcagcaggcaagctatgcgatgggcgtggacatcggacgctccctgaagcaaatgaaggaacagggcgcggaaatcgatttgaaagtctttaccgaagccatgcaggcagtgtatgacggcaaagaaatcaaaatgaccgaagagcaggctcaggaagtcatgatgaaattccttcaggaacaacaggctaaagccgtagaaaaacacaaggcggacgcgaaggccaataaagaaaaaggcgaagcctttctgaaagaaaatgccgccaaagacggcgtgaagaccactgcttccggcctgcaatacaaaatcaccaaacagggcgaaggcaaacagccgaccaaagacgacatcgttaccgtggaatacgaaggccgcctgattgacggtacggtattcgacagcagcaaagccaacggcggcccggtcaccttccctttgagccaagtgattccgggttggaccgaaggcgtacagcttctgaaagaaggcggcgaagccacgttctacatcccgtccaaccttgcctaccgcgaacagggtgcgggcgacaaaatcggtccgaacgccactttggtatttgatgtgaaactggtcaaaatcggcgcacccgaaaacgcgcccgccaagcagccggctcaagtcgacatcaaaaaagtaaattaa

SEQ ID NO: 27 - protein, 272 aa, Neisseria meningitidis
MNTIFKISALTLSAALALSACGKKEAAPASASEPAAASSAQGDTSSIGSTMQQASYAMGVDIGRSLKQMKEQGAEIDLKVFTEAMQAVYDGKEIKMTEEQAQEVMMKFLQEQQAKAVEKHKADAKANKEKGEAFLKENAAKDGVKTTASGLQYKITKQGEGKQPTKDDIVTVEYEGRLIDGTVFDSSKANGGPVTFPLSQVIPGWTEGVQLLKEGGEATFYIPSNLAYREQGAGDKIGPNATLVFDVKLVKIGAPENAPAKQPAQVDIKKVN

SEQ ID NO: 28 - DNA, 819 bp, Neisseria gonorrhoeae
atgaacaccattttcaaaatcagcgcactgaccctttccgccgctttggcactttccgcctgcggcaaaaaagaagccgcccccgcatctgcatccgaacctgccgccgcttctgccgcgcagggcgacacctcttcaatcggcagcacgatgcagcaggcaagctatgcaatgggcgtggacatcggacgctccctgaaacaaatgaaggaacagggcgcggaaatcgatttgaaagtctttaccgatgccatgcaggcagtgtatgacggcaaagaaatcaaaatgaccgaagagcaggcccaggaagtgatgatgaaattcctgcaggagcagcaggctaaagccgtagaaaaacacaaggcggatgcgaaggccaacaaagaaaaaggcgaagccttcctgaaggaaaatgccgccaaagacggcgtgaagaccactgcttccggtctgcagtacaaaatcaccaaacagggtgaaggcaaacagccgacaaaagacgacatcgttaccgtggaatacgaaggccgcctgattgacggtaccgtattcgacagcagcaaagccaacggcggcccggccaccttccctttgagccaagtgattccgggttggaccgaaggcgtacggcttctgaaagaaggcggcgaagccacgttctacatcccgtccaaccttgcctaccgcgaacagggtgcgggcgaaaaaatcggtccgaacgccactttggtatttgacgtgaaactggtcaaaatcggcgcacccgaaaacgcgcccgccaagcagccggatcaagtcgacatcaaaaaagtaaattaa

SEQ ID NO: 29 - protein, 272 aa, Neisseria gonorrhoeae
MNTIFKISALTLSAALALSACGKKEAAPASASEPAAASAAQGDTSSIGSTMQQASYAMGVDIGRSLKQMKEQGAEIDLKVFTDAMQAVYDGKEIKMTEEQAQEVMMKFLQEQQAKAVEKHKADAKANKEKGEAFLKENAAKDGVKTTASGLQYKITKQGEGKQPTKDDIVTVEYEGRLIDGTVFDSSKANGGPATFPLSQVIPGWTEGVRLLKEGGEATFYIPSNLAYREQGAGEKIGPNATLVFDVKLVKIGAPENAPAKQPDQVDIKKVN

SEQ ID NO: 30 - DNA, 819 bp, Neisseria meningitidis; identical to SEQ ID NO: 24

SEQ ID NO: 31 - protein, 272 aa, Neisseria meningitidis; identical to SEQ ID NO: 25

SEQ ID NO: 32 - DNA, 1326 bp, Neisseria meningitidis
atgaaaaaatacctattccgcgccgccctgtacggcatcgccgccgccatcctcgccgcctgccaaagcaagagcatccaaacctttccgcaacccgacacatccgtcatcaacggcccggaccggccggtcggcatccccgaccccgccggaacgacggtcggcggcggcggggccgtctataccgttgtaccgcacctgtccctgccccactgggcggcgcaggatttcgccaaaagcctgcaatccttccgcctcggctgcgccaatttgaaaaaccgccaaggctggcaggatgtgtgcgcccaagcctttcaaacccccgtccattcctttcaggcaaaacagttttttgaacgctatttcacgccgtggcaggttgcaggcaacggaagccttgccggtacggttaccggctattacgaaccggtgctgaagggcgacgacaggcggacggcacaagcccgcttcccgatttacggtattcccgacgattttatctccgtccccctgcctgccggtttgcggagcggaaaagcccttgtccgcatcaggcagacgggaaaaaacagcggcacaatcgacaataccggcggcacacataccgccgacctctcccgattccccatcaccgcgcgcacaacagcaatcaaaggcaggtttgaaggaagccgcttcctcccctaccacacgcgcaaccaaatcaacggcggcgcgcttgacggcaaagccccgatactcggttacgccgaagaccctgtcgaacttttttttatgcacatccaaggctcgggccgtctgaaaaccccgtccggcaaatacatccgcatcggctatgccgacaaaaacgaacatccytacgtttccatcggacgctatatggcggataagggctacctcaaactcggacaaacctccatgcagggcattaagtcttatatgcggcaaaatccgcaacgcctcgccgaagttttgggtcaaaaccccagctatatctttttccgcgagcttgccggaagcagcaatgacggccctgtcggcgcactgggcacgccgctgatgggggaatatgccggcgcagtcgaccggcactacattaccttgggtgcgcccttatttgtcgccaccgcccatccggttacccgcaaagccctcaaccgcctgattatggcgcaggataccggcagcgcgattaaaggcgcggtgcgcgtggattatttttggggatacggcgacgaagccggcgaacttgccggcaaacagaaaaccacgggatatgtctggcagctcctacccaacggtatgaagcccgaataccgcccgtaa

SEQ ID NO: 33 - protein, 441 aa, Neisseria meningitidis
MKKYLFRAALYGIAAAILAACQSKSIQTFPQPDTSVINGPDRPVGIPDPAGTTVGGGGAVYTVVPHLSLPHWAAQDFAKSLQSFRLGCANLKNRQGWQDVCAQAFQTPVHSFQAKQFFERYFTPWQVAGNGSLAGTVTGYYEPVLKGDDRRTAQARFPIYGIPDDFISVPLPAGLRSGKALVRIRQTGKNSGTIDNTGGTHTADLSRFPITARTTAIKGRFEGSRFLPYHTRNQINGGALDGKAPILGYAEDPVELFFMHIQGSGRLKTPSGKYIRIGYADKNEHPYVSIGRYMADKGYLKLGQTSMQGIKSYMRQNPQRLAEVLGQNPSYIFFRELAGSSNDGPVGALGTPLMGEYAGAVDRHYITLGAPLFVATAHPVTRKALNRLIMAQDTGSAIKGAVRVDYFWGYGDEAGELAGKQKTTGYVWQLLPNGMKPEYRP

SEQ ID NO: 34 - DNA, 1326 bp, Neisseria meningitidis
atgaaaaaatacctattccgcgccgccctgtacggcatcgccgccgccatcctcgccgcctgccaaagcaagagcatccaaacctttccgcaacccgacacatccgtcatcaacggcccggaccggccggtcggcatccccgaccccgccggaacgacggtcggcggcggcggggccgtctataccgttgtaccgcacctgtccctgccccactgggcggcgcaggatttcgccaaaagcctgcaatccttccgcctcggctgcgccaatttgaaaaaccgccaaggctggcaggatgtgtgcgcccaagcctttcaaacccccgtccattcctttcaggcaaaacagttttttgaacgctatttcacgccgtggcaggttgcaggcaacggaagccttgccggtacggttaccggctattacgaaccggtgctgaagggcgacgacaggcggacggcacaagcccgcttcccgatttacggtattcccgacgattttatctccgtccccctgcctgccggtttgcggagcggaaaagcccttgtccgcatcaggcagacgggaaaaaacagcggcacaatcgacaataccggcggcacacataccgccgacctctcccgattccccatcaccgcgcgcacaacagcaatcaaaggcaggtttgaaggaagccgcttcctcccctaccacacgcgcaaccaaatcaacggcggcgcgcttgacggcaaagccccgatactcggttacgccgaagaccctgtcgaacttttttttatgcacatccaaggctcgggccgtctgaaaaccccgtccggcaaatacatccgcatcggctatgccgacaaaaacgaacatccctacgtttccatcggacgctatatggcggataagggctacctcaaactcggacaaacctccatgcagggcattaagtcttatatgcggcaaaatccgcaacgcctcgccgaagttttgggtcaaaaccccagctatatctttttccgcgagcttgccggaagcagcaatgacggccctgtcggcgcactgggcacgccgctgatgggggaatatgccggcgcagtcgaccggcactacattaccttgggtgcgcccttatttgtcgccaccgcccatccggttacccgcaaagccctcaaccgcctgattatggcgcaggataccggcagcgcgattaaaggcgcggtgcgcgtggattatttttggggatacggcgacgaagccggcgaacttgccggcaaacagaaaaccacgggatatgtctggcagctcctacccaacggtatgaagcccgaataccgcccgtaa

SEQ ID NO: 35 - protein, 441 aa, Neisseria meningitidis; identical to SEQ ID NO: 33

SEQ ID NO: 36 - DNA, 1326 bp, Neisseria gonorrhoeae
atgaaaaaacacctgctccgctccgccctgtacggcatcgccgccgccatcctcgccgcctgccaaagcaggagcatccaaacctttccgcaacccgacacatccgtcatcaacggcccggaccggccggccggcatccccgaccccgccggaacgacggttgccggcggcggggccgtctataccgttgtgccgcacctgtccatgccccactgggcggcgcaggattttgccaaaagcctgcaatccttccgcctcggctgcgccaatttgaaaaaccgccaaggctggcaggatgtgtgcgcccaagcctttcaaacccccgtgcattcctttcaggcaaagcggttttttgaacgctatttcacgccgtggcaggttgcaggcaacggaagccttgcaggtacggttaccggctattacgaaccggtgctgaagggcgacggcaggcggacggaacgggcccgcttcccgatttacggtattcccgacgattttatctccgtcccgctgcctgccggtttgcggggcggaaaaaaccttgtccgcatcaggcagacggggaaaaacagcggcacgatcgacaatgccggcggcacgcataccgccgacctctcccgattccccatcaccgcgcgcacaacggcaatcaaaggcaggtttgaaggaagccgcttcctcccttaccacacgcgcaaccaaatcaacggcggcgcgcttgacggcaaagcccccatcctcggttacgccgaagaccccgtcgaactttttttcatgcacatccaaggctcgggccgcctgaaaaccccgtccggcaaatacatccgcatcggatacgccgacaaaaacgaacatccgtatgtttccatcggacgctatatggcggacaaaggctacctcaagctcgggcagacctcgatgcagggcatcaaagcctatatgcggcaaaatccgcaacgcctcgccgaagttttgggtcaaaaccccagctatatctttttccgcgagcttgccggaagcggcaatgagggccccgtcggcgcactgggcacgccactgatgggggaatacgccggcgcaatcgaccggcactacattaccttgggcgcgcccttatttgtcgccaccgcccatccggttacccgcaaagccctcaaccgcctgattatggcgcaggatacaggcagcgcgatcaaaggcgcggtgcgcgtggattatttttggggttacggcgacgaagccggcgaacttgccggcaaacagaaaaccacgggatacgtctggcagctcctgcccaacggcatgaagcccgaataccgcccgtga

SEQ ID NO: 37 - protein, 441 aa, Neisseria gonorrhoeae
MKKHLLRSALYGIAAAILAACQSRSIQTFPQPDTSVINGPDRPAGIPDPAGTTVAGGGAVYTVVPHLSMPHWAAQDFAKSLQSFRLGCANLKNRQGWQDVCAQAFQTPVHSFQAKRFFERYFTPWQVAGNGSLAGTVTGYYEPVLKGDGRRTERARFPIYGIPDDFISVPLPAGLRGGKNLVRIRQTGKNSGTIDNAGGTHTADLSRFPITARTTAIKGRFEGSRFLPYHTRNQINGGALDGKAPILGYAEDPVELFFMHIQGSGRLKTPSGKYIRIGYADKNEHPYVSIGRYMADKGYLKLGQTSMQGIKAYMRQNPQRLAEVLGQNPSYIFFRELAGSGNEGPVGALGTPLMGEYAGAIDRHYITLGAPLFVATAHPVTRKALNRLIMAQDTGSAIKGAVRVDYFWGYGDEAGELAGKQKTTGYVWQLLPNGMKPEYRP

SEQ ID NO: 38 - DNA, 1326 bp, Neisseria meningitidis
atgaaaaaatacctattccgcgccgccctgtgcggcatcgccgccgccatcctcgccgcctgccaaagcaagagcatccaaacctttccgcaacccgacacatccgtcatcaacggcccggaccggccggtcggcatccccgaccccgccggaacgacggtcggcggcggcggggccgtttataccgttgtgccgcacctgtccctgccccactgggcggcgcaggatttcgccaaaagcctgcaatccttccgcctcggctgcgccaatttgaaaaaccgccaaggctggcaggatgtgtgcgcccaagcctttcaaacccccgtccattccgttcaggcaaaacagttttttgaacgctatttcacgccgtggcaggttgcaggcaacggaagccttgccggtacggttaccggctattacgagccggtgctgaagggcgacgacaggcggacggcacaagcccgcttcccgatttacggtattcccgacgattttatctccgtccccctgcctgccggtttgcggagcggaaaagcccttgtccgcatcaggcagacgggaaaaaacagcggcacaatcgacaataccggcggcacacataccgccgacctctcccaattccccatcactgcgcgcacaacggcaatcaaaggcaggtttgaaggaagccgcttcctcccctaccacacgcgcaaccaaatcaacggcggcgcgcttgacggcaaagccccgatactcggttacgccgaagaccccgtcgaacttttttttatgcacatccaaggctcgggccgtctgaaaaccccgtccggcaaatacatccgcatcggctatgccgacaaaaacgaacatccctacgtttccatcggacgctatatggcggacaaaggctacctcaagctcgggcagacctcgatgcagggcatcaaagcctatatgcagcaaaacccgcaacgcctcgccgaagttttggggcaaaaccccagctatatctttttccgagagcttaccggaagcagcaatgacggccctgtcggcgcactgggcacgccgctgatgggcgagtacgccggcgcagtcgaccggcactacattaccttgggcgcgcccttatttgtcgccaccgcccatccggttacccgcaaagccctcaaccgcctgattatggcgcaggataccggcagcgcgattaaaggcgcggtgcgcgtggattatttttggggatacggcgacgaagccggcgaacttgccggcaaacagaaaaccacgggatatgtctggcagcttctgcccaacggtatgaagcccgaataccgcccgtaa

SEQ ID NO: 39 - protein, 441 aa, Neisseria meningitidis
MKKYLFRAALCGIAAAILAACQSKSIQTFPQPDTSVINGPDRPVGIPDPAGTTVGGGGAVYTVVPHLSLPHWAAQDFAKSLQSFRLGCANLKNRQGWQDVCAQAFQTPVHSVQAKQFFERYFTPWQVAGNGSLAGTVTGYYEPVLKGDDRRTAQARFPIYGIPDDFISVPLPAGLRSGKALVRIRQTGKNSGTIDNTGGTHTADLSQFPITARTTAIKGRFEGSRFLPYHTRNQINGGALDGKAPILGYAEDPVELFFMHIQGSGRLKTPSGKYIRIGYADKNEHPYVSIGRYMADKGYLKLGQTSMQGIKAYMQQNPQRLAEVLGQNPSYIFFRELTGSSNDGPVGALGTPLMGEYAGAVDRHYITLGAPLFVATAHPVTRKALNRLIMAQDTGSAIKGAVRVDYFWGYGDEAGELAGKQKTTGYVWQLLPNGMKPEYRP

SEQ ID NO: 40 - DNA, 1101 bp, Neisseria meningitidis
  misc_feature (364)...(606): n = A,T,C or G
  misc_feature 995, 1082: n = A,T,C or G
atggaaacacagctttacatcggcatcatgtcgggaaccagcatggacggggcggatgccgtactgatacggatggacggcggcaaatggctgggcgcggaagggcacgcctttaccccctaccccggcaggttacgccgccaattgctggatttgcaggacacaggcgcagacgaactgcaccgcagcaggattttgtcgcaagaactcagccgcctatatgcgcaaaccgccgccgaactgctgtgcagtcaaaacctcgcaccgtccgacattaccgccctcggctgccacgggcaaaccgtccgacacgcgccggaacacggttacagcatacagcttgccgatttgccgctgctggcgnnnnnnnnnnnnnnnnnnnnnnnnnnnnnnnnnnnnnnnnnnnnnnnnnnnnnnnnnnnnnnnnnnnnnnnnnnnnnnnnnnnnnnnnnnnnnnnnnnnnnnnnnnnnnnnnnnnnnnnnnnnnnnnnnnnnnnnnnnnnnnnnnnnnnnnnnnnnnnnnnnnnnnnnnnnnnnnnnnnnnnnnnnnnnnnnnnnnnnnnnnnnnnnnnnnnnnnnnnnnnnnnnnnnnnnnnnnnnnnnnnncagcttccttacgacaaaaacggtgcaaagtcggcacaaggcaacatattgccgcaactgctcgacaggctgctcgcccacccgtatttcgcacaacgccaccctaaaagcacggggcgcgaactgtttgccataaattggctcgaaacctaccttgacggcggcgaaaaccgatacgacgtattgcggacgctttcccgttttaccgcgcaaaccgtttgcgacgccgtctcacacgcagcggcagatgcccgtcaaatgtacatttgcgacggcggcatccgcaatcctgttttaatggcggatttggcagaatgtttcggcacacgcgtttccctgcacagcaccgccgacctgaacctcgatccgcaatgggtggaagccgccgnatttgcgtggttggcggcgtgttggattaatcgcattcccggtagtccgcacaaagcaaccggcgcatccaaaccgtgtattctgancgcgggatattattattga

SEQ ID NO: 41 - protein, 366 aa, Neisseria meningitidis
  VARIANT 122, 123, 124, 125, 126, 127, 128, 129, 130, 131, 132, 133,134, 135, 136, 137, 138, 139, 140, 141, 142, 143, 144, 145,146, 147, 148, 149, 150, 151, 152, 153, 154, 155, 156, 157,158, 159, 160, 161, 162, 163, 164, 165, 166, 167, 168: Xaa = Any Amino Acid
  VARIANT 169, 170, 171, 172, 173, 174, 175, 176, 177, 178, 179, 180,181, 182, 183, 184, 185, 186, 187, 188, 189, 190, 191, 192,193, 194, 195, 196, 197, 198, 199, 200, 201, 202, 332, 361: Xaa = Any Amino Acid
METQLYIGIMSGTSMDGADAVLIRMDGGKWLGAEGHAFTPYPGRLRRQLLDLQDTGADELHRSRILSQELSRLYAQTAAELLCSQNLAPSDITALGCHGQTVRHAPEHGYSIQLADLPLLAXXXXXXXXXXXXXXXXXXXXXXXXXXXXXXXXXXXXXXXXXXXXXXXXXXXXXXXXXXXXXXXXXXXXXXXXXXXXXXXXXQLPYDKNGAKSAQGNILPQLLDRLLAHPYFAQRHPKSTGRELFAINWLETYLDGGENRYDVLRTLSRFTAQTVCDAVSHAAADARQMYICDGGIRNPVLMADLAECFGTRVSLHSTADLNLDPQWVEAAXFAWLAACWINRIPGSPHKATGASKPCILXAGYYY

SEQ ID NO: 42 - DNA, 1101 bp, Neisseria gonorrhoeae
atggaaacacagctttacatcggcattatgtcgggaaccagtatggacggggcggatgccgtgctggtacggatggacggcggcaaatggctgggcgcggaagggcacgcctttaccccctaccctgaccggttgcgccgcaaattgctggatttgcaggacacaggcacagacgaactgcaccgcagcaggatgttgtcgcaagaactcagccgcctgtacgcgcaaaccgccgccgaactgctgtgcagtcaaaacctcgctccgtgcgacattaccgccctcggctgccacgggcaaaccgtccgacacgcgccggaacacggttacagcatacagcttgccgatttgccgctgctggcggaactgacgcggatttttaccgtcggcgacttccgcagccgcgaccttgctgccggcggacaaggtgcgccgctcgtccccgcctttcacgaagccctgttccgcgatgacagggaaacacgcgtggtactgaacatcggcgggattgccaacatcagcgtactcccccccggcgcacccgccttcggcttcgacacagggccgggcaatatgctgatggacgcgtggacgcaggcacactggcagctgccttacgacaaaaacggtgcaaaggcggcacaaggcaacatattgccgcaactgctcggcaggctgctcgcccacccgtatttctcacaaccccacccaaaaagcacggggcgcgaactgtttgccctaaattggctcgaaacctaccttgacggcggcgaaaaccgatacgacgtattgcggacgctttcccgattcaccgcgcaaaccgtttgggacgccgtctcacacgcagcggcagatgcccgtcaaatgtacatttgcggcggcggcatccgcaatcctgttttaatggcggatttggcagaatgtttcggcacacgcgtttccctgcacagcaccgccgaactgaacctcgatcctcaatgggtggaggcggccgcatttgcgtggttggcggcgtgttggattaaccgcattcccggtagtccgcacaaagcgaccggcgcatccaaaccgtgtattctgggcgcgggatattattattga

SEQ ID NO: 43 - protein, 366 aa, Neisseria gonorrhoeae
METQLYIGIMSGTSMDGADAVLVRMDGGKWLGAEGHAFTPYPDRLRRKLLDLQDTGTDELHRSRMLSQELSRLYAQTAAELLCSQNLAPCDITALGCHGQTVRHAPEHGYSIQLADLPLLAELTRIFTVGDFRSRDLAAGGQGAPLVPAFHEALFRDDRETRVVLNIGGIANISVLPPGAPAFGFDTGPGNMLMDAWTQAHWQLPYDKNGAKAAQGNILPQLLGRLLAHPYFSQPHPKSTGRELFALNWLETYLDGGENRYDVLRTLSRFTAQTVWDAVSHAAADARQMYICGGGIRNPVLMADLAECFGTRVSLHSTAELNLDPQWVEAAAFAWLAACWINRIPGSPHKATGASKPCILGAGYYY

SEQ ID NO: 44 - DNA, 1101 bp, Neisseria meningitidis
atggaaacacagctttacatcggcatcatgtcgggaaccagcatggacggggcggatgccgtactgatacggatggacggcggcaaatggctgggcgcggaagggcacgcctttaccccctaccccggcaggttacgccgcaaattgctggatttgcaggacacaggcgcggacgaactgcaccgcagcaggatgttgtcgcaagaactcagccgcctgtacgcgcaaaccgccgccgaactgctgtgcagtcaaaacctcgcgccgtccgacattaccgccctcggctgccacgggcaaaccgtcagacacgcgccggaacacagttacagcgtacagcttgccgatttgccgctgctggcggaacggactcagatttttaccgtcggcgacttccgcagccgcgaccttgcggccggcggacaaggcgcgccgctcgtccccgcctttcacgaagccctgttccgcgacgacagggaaacacgcgcggtactgaacatcggcgggattgccaacatcagcgtactcccccccgacgcacccgccttcggcttcgacacaggaccgggcaatatgctgatggacgcgtggatgcaggcacactggcagcttccttacgacaaaaacggtgcaaaggcggcacaaggcaacatattgccgcaactgctcgacaggctgctcgcccacccgtatttcgcacaaccccaccctaaaagcacggggcgcgaactgtttgccctaaattggctcgaaacctaccttgacggcggcgaaaaccgatacgacgtattgcggacgctttcccgattcaccgcgcaaaccgttttcgacgccgtctcacacgcagcggcagatgcccgtcaaatgtacatttgcggcggcggcatccgcaatcctgttttaatggcggatttggcagaatgtttcggcacacgcgtttccctgcacagcaccgccgaactgaacctcgatccgcaatgggtagaagccgccgcgttcgcatggatggcggcgtgttgggtcaaccgcattcccggtagtccgcacaaagcaaccggcgcatccaaaccgtgtattctgggcgcgggatattattattga

SEQ ID NO: 45 - protein, 366 aa, Neisseria meningitidis
METQLYIGIMSGTSMDGADAVLIRMDGGKWLGAEGHAFTPYPGRLRRKLLDLQDTGADELHRSRMLSQELSRLYAQTAAELLCSQNLAPSDITALGCHGQTVRHAPEHSYSVQLADLPLLAERTQIFTVGDFRSRDLAAGGQGAPLVPAFHEALFRDDRETRAVLNIGGIANISVLPPDAPAFGFDTGPGNMLMDAWMQAHWQLPYDKNGAKAAQGNILPQLLDRLLAHPYFAQPHPKSTGRELFALNWLETYLDGGENRYDVLRTLSRFTAQTVFDAVSHAAADARQMYICGGGIRNPVLMADLAECFGTRVSLHSTAELNLDPQWVEAAAFAWMAACWVNRIPGSPHKATGASKPCILGAGYYY

SEQ ID NO: 46 - DNA, 1101 bp, Neisseria meningitidis
  misc_feature 995, 1082: n = A,T,C or G
atggaaacacagctttacatcggcatcatgtcgggaaccagcatggacggggcggatgccgtactgatacggatggacggcggcaaatggctgggcgcggaagggcacgcctttaccccctaccccggcaggttacgccgccaattgctggatttgcaggacacaggcgcagacgaactgcaccgcagcaggattttgtcgcaagaactcagccgcctatatgcgcaaaccgccgccgaactgctgtgcagtcaaaacctcgcaccgtccgacattaccgccctcggctgccacgggcaaaccgtccgacacgcgccggaacacggttacagcatacagcttgccgatttgccgctgctggcggaacggacgcggatttttaccgtcggcgacttccgcagccgcgaccttgcggccggcggacaaggcgcgccactcgtccccgcctttcacgaagccctgttccgcgacaacagggaaacacgcgcggtactgaacatcggcgggattgccaacatcagcgtactcccccccgacgcacccgccttcggcttcgacacagggccgggcaatatgctgatggacgcgtggacgcaggcacactggcagcttccttacgacaaaaacggtgcaaaggcggcacaaggcaacatattgccgcaactgctcgacaggctgctcgcccacccgtatttcgcacaaccccaccctaaaagcacggggcgcgaactgtttgccctaaattggctcgaaacctaccttgacggcggcgaaaaccgatacgacgtattgcggacgctttcccgttttaccgcgcaaaccgtttgcgacgccgtctcacacgcagcggcagatgcccgtcaaatgtacatttgcggcggcggcatccgcaatcctgttttaatggcggatttggcagaatgtttcggcacacgcgtttccctgcacagcaccgccgacctgaacctcgatccgcaatgggtggaagccgccgnatttgcgtggttggcggcgtgttggattaatcgcattcccggtagtccgcacaaagcaaccggcgcatccaaaccgtgtattctgancgcgggatattattattga

SEQ ID NO: 47 - protein, 366 aa, Neisseria meningitidis
  VARIANT 332, 361: Xaa = Any Amino Acid
METQLYIGIMSGTSMDGADAVLIRMDGGKWLGAEGHAFTPYPGRLRRQLLDLQDTGADELHRSRILSQELSRLYAQTAAELLCSQNLAPSDITALGCHGQTVRHAPEHGYSIQLADLPLLAERTRIFTVGDFRSRDLAAGGQGAPLVPAFHEALFRDNRETRAVLNIGGIANISVLPPDAPAFGFDTGPGNMLMDAWTQAHWQLPYDKNGAKAAQGNILPQLLDRLLAHPYFAQPHPKSTGRELFALNWLETYLDGGENRYDVLRTLSRFTAQTVCDAVSHAAADARQMYICGGGIRNPVLMADLAECFGTRVSLHSTADLNLDPQWVEAAXFAWLAACWINRIPGSPHKATGASKPCILXAGYYY

SEQ ID NO: 48 - DNA, 1101 bp, Neisseria meningitidis; identical to SEQ ID NO: 44

SEQ ID NO: 49 - protein, 366 aa, Neisseria meningitidis; identical to SEQ ID NO: 45

SEQ ID NO: 50 - DNA, 396 bp, Neisseria meningitidis
atgactgacaacgcactgctccatttgggcgaagaaccccgttttgatcaaatcaaaaccgaagacatcaaacccgccctgcaaaccgccatcgccgaagcgcgcgaacaaatcgccgccatcaaagcccaaacgcacaccggctgggcaaacactgtcgaacccctgaccggcatcaccgaacgcgtcggcaggatttggggcgtggtgtcgcacctcaactgcgtcgccgacacgcccgaactgcgcgccgtctataacgaactgatgcccgaaatcaccgtcttcttcaccgaaatcggacaagacatcgagctgtacaaccgcttcaaaaccatcaaaaattcccccgaattcgacaccctctcccccgcacaaaaaaccaaactcaaccac

SEQ ID NO: 51 - protein, 132 aa, Neisseria meningitidis
MTDNALLHLGEEPRFDQIKTEDIKPALQTAIAEAREQIAAIKAQTHTGWANTVEPLTGITERVGRIWGVVSHLNCVADTPELRAVYNELMPEITVFFTEIGQDIELYNRFKTIKNSPEFDTLSPAQKTKLNH

SEQ ID NO: 52 - DNA, 2037 bp, Neisseria gonorrhoeae
atgattgacaacgcactgctccacttgggcgaagaaccccgttttaatcaaatccaaaccgaagacatcaaacccgccgtccaaaccgccatcgccgaagcgcgcggacaaatcgccgccgtcaaagcgcaaacgcacaccggctgggcgaacaccgtcgagcgtctgaccggcatcaccgaacgcgtcggcaggatttggggcgtcgtgtcccatctcaactccgtcgtcgacacgcccgaactgcgcgccgtctataacgaactgatgcctgaaatcaccgtcttcttcaccgaaatcggacaagacatcgaactgtacaaccgcttcaaaaccatcaaaaattcccccgaatttgcaacgctttcccccgcacaaaaaaccaagctcgatcacgacctgcgcgatttcgtattgagcggcgcggaactgccgcccgaacggcaggcagaactggcaaaactgcaaaccgaaggcgcgcaactttccgccaaattctcccaaaacgtcctagacgcgaccgacgcgttcggcatttactttgacgatgccgcaccgcttgccggcattcccgaagacgcgctcgccatgtttgccgccgccgcgcaaagcgaaggcaaaacaggttacaaaatcggcttgcagattccgcactaccttgccgttatccaatacgccggcaaccgcgaactgcgcgaacaaatctaccgcgcctacgttacccgtgccagcgaactttcaaacgacggcaaattcgacaacaccgccaacatcgaccgcacgctcgaaaacgcattgaaaaccgccaaactgctcggctttaaaaattacgccgaattgtcgctggcaaccaaaatggcggacacgcccgaacaggttttaaacttcctgcacgacctcgcccgccgcgccaaaccctacgccgaaaaagacctcgccgaagtcaaagccttcgcccgcgaacacctcggtctcgccgacccgcagccgtgggacttgagctacgccggcgaaaaactgcgcgaagccaaatacgcattcagcgaaaccgaagtcaaaaaatacttccccgtcggcaaagttctggcaggcctgttcgcccaaatcaaaaaactctacggcatcggattcgccgaaaaaaccgttcccgtctggcacaaagacgtgcgctattttgaattgcaacaaaacggcaaaaccatcggcggcgtttatatggatttgtacgcacgcgaaggcaaacgcggcggcgcgtggatgaacgactacaaaggccgccgccgctttgccgacggcacgctgcaactgcccaccgcctacctcgtctgcaacttcgccccgcccgtcggcggcaaagaagcgcgtttaagccacgacgaaatcctcaccctcttccacgaaaccggccacggactgcaccacctgcttacccaagtggacgaactgggcgtgtccggcatcaacggcgtagaatgggacgcggtcgaactgcccagccagtttatggaaaacttcgtttgggaatacaatgtattggcacaaatgtccgcccacgaagaaaccggcgagcccctgccgaaagaactcttcgacaaaatgctcgccgccaaaaacttccagcgcggtatgttcctcgtccggcaaatggagttcgccctcttcgatatgatgatttacagtgaaagcgacgaatgccgtctgaaaaactggcagcaggttttagacagcgtgcgcaaagaagtcgccgtcatccaaccgcccgaatacaaccgcttcgccaacagcttcggccacatcttcgccggcggctattccgcaggctattacagctacgcatgggccgaagtcctcagcaccgatgcctacgccgcctttgaagaaagcgacgacgtcgccgccacaggcaaacgcttctggcaagaaatccttgccgtcggcggctcccgcagcgcggcggaatccttcaaagccttccgcggacgcgaaccgagcatagacgcactgctgcgccaaagcggtttcgacaacgcggcttga

SEQ ID NO: 53 - protein, 678 aa, Neisseria gonorrhoeae
MIDNALLHLGEEPRFNQIQTEDIKPAVQTAIAEARGQIAAVKAQTHTGWANTVERLTGITERVGRIWGVVSHLNSVVDTPELRAVYNELMPEITVFFTEIGQDIELYNRFKTIKNSPEFATLSPAQKTKLDHDLRDFVLSGAELPPERQAELAKLQTEGAQLSAKFSQNVLDATDAFGIYFDDAAPLAGIPEDALAMFAAAAQSEGKTGYKIGLQIPHYLAVIQYAGNRELREQIYRAYVTRASELSNDGKFDNTANIDRTLENALKTAKLLGFKNYAELSLATKMADTPEQVLNFLHDLARRAKPYAEKDLAEVKAFAREHLGLADPQPWDLSYAGEKLREAKYAFSETEVKKYFPVGKVLAGLFAQIKKLYGIGFAEKTVPVWHKDVRYFELQQNGKTIGGVYMDLYAREGKRGGAWMNDYKGRRRFADGTLQLPTAYLVCNFAPPVGGKEARLSHDEILTLFHETGHGLHHLLTQVDELGVSGINGVEWDAVELPSQFMENFVWEYNVLAQMSAHEETGEPLPKELFDKMLAAKNFQRGMFLVRQMEFALFDMMIYSESDECRLKNWQQVLDSVRKEVAVIQPPEYNRFANSFGHIFAGGYSAGYYSYAWAEVLSTDAYAAFEESDDVAATGKRFWQEILAVGGSRSAAESFKAFRGREPSIDALLRQSGFDNAA

SEQ ID NO: 54 - DNA, 2037 bp, Neisseria meningitidis
atgactgacaacgcactgctccatttgggcgaagaaccccgttttgatcaaatcaaaaccgaagacatcaaacccgccctgcaaaccgccattgccgaagcgcgcgaacaaatcgccgccatcaaagcccaaacgcacaccggctgggcaaacactgtcgaacccctgaccggcatcaccgaacgcgtcggcaggatttggggcgtggtgtcgcacctcaactccgtcaccgacacgcccgaactgcgcgccgcctacaatgaattaatgcccgaaattaccgtcttcttcaccgaaatcggacaagacatcgagctgtacaaccgcttcaaaaccatcaaaaactcccccgagttcgacaccctctcccacgcgcaaaaaaccaaactcaaccacgatctgcgcgatttcgtcctcagcggcgcggaactgccgcccgaacagcaggcagaattggcaaaactgcaaaccgaaggcgcgcaactttccgccaaattctcccaaaacgtcctagacgcgaccgacgcgttcggcatttactttgacgatgccgcaccgcttgccggcattcccgaagacgcgctcgccatgtttgccgctgccgcgcaaagcgaaggcaaaacaggctacaaaatcggtttgcagattccgcactacctcgccgtcatccaatacgccgacaaccgcaaactgcgcgaacaaatctaccgcgcctacgttacccgcgccagcgagctttcagacgacggcaaattcgacaacaccgccaacatcgaccgcacgctcgaaaacgccctgcaaaccgccaaactgctcggcttcaaaaactacgccgaattgtcgctggcaaccaaaatggcggacacccccgaacaagttttaaacttcctgcacgacctcgcccgccgcgccaaaccctacgccgaaaaagacctcgccgaagtcaaagccttcgcccgcgaaagcctcggcctcgccgatttgcaaccgtgggacttgggctacgccggcgaaaaactgcgcgaagccaaatacgcattcagcgaaaccgaagtcaaaaaatacttccccgtcggcaaagtattaaacggactgttcgcccaaatcaaaaaactctacggcatcggatttaccgaaaaaaccgtccccgtctggcacaaagacgtgcgctattttgaattgcaacaaaacggcgaaaccataggcggcgtttatatggatttgtacgcacgcgaaggcaaacgcggcggcgcgtggatgaacgactacaaaggccgccgccgtttttcagacggcacgctgcaactgcccaccgcctacctcgtctgcaacttcaccccgcccgtcggcggcaaagaagcccgcttgagccatgacgaaatcctcaccctcttccacgaaaccggacacggcctgcaccacctgcttacccaagtcgacgaactgggcgtatccggcatcaacggcgtagaatgggacgcagtcgaactgcccagtcagtttatggaaaatttcgtttgggaatacaatgtcttggcgcaaatgtccgcccacgaagaaaccggcgttcccctgccgaaagaactcttcgacaaaatgctcgccgccaaaaacttccaacgcggaatgttcctcgtccgccaaatggagttcgccctctttgatatgatgatttacagcgaagacgacgaaggccgtctgaaaaactggcaacaggttttagacagcgtgcgcaaagaagtcgccgtcgtccgaccgcccgaatacaaccgcttcgccaacagcttcggccacatcttcgcaggcggctattccgcaggctattacagctacgcgtgggcggaagtattgagcgcggacgcatacgccgcctttgaagaaagcgacgatgtcgccgccacaggcaaacgcttttggcaggaaatcctcgccgtcggcggatcgcgcagcgcggcagaatccttcaaagccttccgcggacgcgaaccgagcatagacgcactcttgcgccacagcggcttcgacaacgcggcttga

SEQ ID NO: 55 - protein, 678 aa, Neisseria meningitidis
MTDNALLHLGEEPRFDQIKTEDIKPALQTAIAEAREQIAAIKAQTHTGWANTVEPLTGITERVGRIWGVVSHLNSVTDTPELRAAYNELMPEITVFFTEIGQDIELYNRFKTIKNSPEFDTLSHAQKTKLNHDLRDFVLSGAELPPEQQAELAKLQTEGAQLSAKFSQNVLDATDAFGIYFDDAAPLAGIPEDALAMFAAAAQSEGKTGYKIGLQIPHYLAVIQYADNRKLREQIYRAYVTRASELSDDGKFDNTANIDRTLENALQTAKLLGFKNYAELSLATKMADTPEQVLNFLHDLARRAKPYAEKDLAEVKAFARESLGLADLQPWDLGYAGEKLREAKYAFSETEVKKYFPVGKVLNGLFAQIKKLYGIGFTEKTVPVWHKDVRYFELQQNGETIGGVYMDLYAREGKRGGAWMNDYKGRRRFSDGTLQLPTAYLVCNFTPPVGGKEARLSHDEILTLFHETGHGLHHLLTQVDELGVSGINGVEWDAVELPSQFMENFVWEYNVLAQMSAHEETGVPLPKELFDKMLAAKNFQRGMFLVRQMEFALFDMMIYSEDDEGRLKNWQQVLDSVRKEVAVVRPPEYNRFANSFGHIFAGGYSAGYYSYAWAEVLSADAYAAFEESDDVAATGKRFWQEILAVGGSRSAAESFKAFRGREPSIDALLRHSGFDNAA

SEQ ID NO: 56 - DNA, 2037 bp, Neisseria meningitidis
atgactgacaacgcactgctccatttgggcgaagaaccccgttttgatcaaatcaaaaccgaagacatcaaacccgccctgcaaaccgccatcgccgaagcgcgcgaacaaatcgccgccatcaaagcccaaacgcacaccggctgggcaaacactgtcgaacccctgaccggcatcaccgaacgcgtcggcaggatttggggcgtggtgtcgcacctcaactccgtcgccgacacgcccgaactgcgcgccgtctataacgaactgatgcccgaaatcaccgtcttcttcaccgaaatcggacaagacatcgagctgtacaaccgcttcaaaaccatcaaaaattcccccgaattcgacaccctctcccccgcacaaaaaaccaaactcaaccacgatctgcgcgatttcgtcctcagcggcgcggaactgccgcccgaacagcaggcagaactggcaaaactgcaaaccgaaggcgcgcaactttccgccaaattctcccaaaacgtcctagacgcgaccgacgcgttcggcatttactttgacgatgccgcaccgcttgccggcattcccgaagacgcgctcgccatgtttgccgccgccgcgcaaagcgaaagcaaaacaggctacaaaatcggcttgcagattccacactacctcgccgtcatccaatacgccgacaaccgcgaactgcgcgaacaaatctaccgcgcctacgttacccgcgccagcgaactttcagacgacggcaaattcgacaacaccgccaacatcgaccgcacgctcgcaaacgccctgcaaaccgccaaactgctcggcttcaaaaactacgccgaattgtcgctggcaaccaaaatggcggacacgcccgaacaagttttaaacttcctgcacgacctcgcccgccgcgccaaaccctacgccgaaaaagacctcgccgaagtcaaagccttcgcccgcgaaagcctgaacctcgccgatttgcaaccgtgggacttgggctacgccagcgaaaaactgcgcgaagccaaatacgcgttcagcgaaaccgaagtcaaaaaatacttccccgtcggcaaagtattaaacggactgttcgcccaaatcaaaaaactctacggcatcggatttaccgaaaaaaccgtccccgtctggcacaaagacgtgcgctattttgaattgcaacaaaacggcgaaaccataggcggcgtttatatggatttgtacgcacgcgaaggcaaacgcggcggcgcgtggatgaacgactacaaaggccgccgccgtttttcagacggcacgctgcaactgcccaccgcctacctcgtctgcaacttcgccccacccgtcggcggcagggaagcccgcctgagccacgacgaaatcctcatcctcttccacgaaaccggacacgggctgcaccacctgcttacccaagtggacgaactgggcgtatccggcatcaacggcgtagaatgggacgcggtcgaactgcccagccagtttatggaaaatttcgtttgggaatacaatgtcttggcacaaatgtcagcccacgaagaaaccggcgttcccctgccgaaagaactcttcgacaaaatgctcgccgccaaaaacttccaacgcggcatgttcctcgtccggcaaatggagttcgccctctttgatatgatgatttacagcgaagacgacgaaggccgtctgaaaaactggcaacaggttttagacagcgtgcgcaaaaaagtcgccgtcatccagccgcccgaatacaaccgcttcgccttgagcttcggccacatcttcgcaggcggctattccgcaggctattacagctacgcgtgggcggaagtattgagcgcggacgcatacgccgcctttgaagaaagcgacgatgtcgccgccacaggcaaacgcttttggcaggaaatcctcgccgtcggcggatcgcgcagcgcggcagaatccttcaaagccttccgcggccgcgaaccgagcatagacgcactcttgcgccacagcggtttcgacaacgcggtctga

SEQ ID NO: 57 - protein, 678 aa, Neisseria meningitidis
MTDNALLHLGEEPRFDQIKTEDIKPALQTAIAEAREQIAAIKAQTHTGWANTVEPLTGITERVGRIWGVVSHLNSVADTPELRAVYNELMPEITVFFTEIGQDIELYNRFKTIKNSPEFDTLSPAQKTKLNHDLRDFVLSGAELPPEQQAELAKLQTEGAQLSAKFSQNVLDATDAFGIYFDDAAPLAGIPEDALAMFAAAAQSESKTGYKIGLQIPHYLAVIQYADNRELREQIYRAYVTRASELSDDGKFDNTANIDRTLANALQTAKLLGFKNYAELSLATKMADTPEQVLNFLHDLARRAKPYAEKDLAEVKAFARESLNLADLQPWDLGYASEKLREAKYAFSETEVKKYFPVGKVLNGLFAQIKKLYGIGFTEKTVPVWHKDVRYFELQQNGETIGGVYMDLYAREGKRGGAWMNDYKGRRRFSDGTLQLPTAYLVCNFAPPVGGREARLSHDEILILFHETGHGLHHLLTQVDELGVSGINGVEWDAVELPSQFMENFVWEYNVLAQMSAHEETGVPLPKELFDKMLAAKNFQRGMFLVRQMEFALFDMMIYSEDDEGRLKNWQQVLDSVRKKVAVIQPPEYNRFALSFGHIFAGGYSAGYYSYAWAEVLSADAYAAFEESDDVAATGKRFWQEILAVGGSRSAAESFKAFRGREPSIDALLRHSGFDNAV

SEQ ID NO: 58 - DNA, 1473 bp, Neisseria gonorrhoeae
atgattgacaacgcactgctccacttgggcgaagaaccccgttttaatcaaatcaaaaccgaagacatcaaacccgccgtccaaaccgccatcgccgaagcgcgcggacaaatcgccgccgtcaaagcgcaaacgcacaccggctgggcgaacaccgtcgagcgtctgaccggcatcaccgaacgcgtcggcaggatttggggcgtcgtgtcccatctcaactccgtcgtcgacacgcccgaactgcgcgccgtctataacgaactgatgcctgaaatcaccgtcttcttcaccgaaatcggacaagacatcgaactgtacaaccgcttcaaaaccatcaaaaattcccccgaatttgcaacgctttcccccgcacaaaaaaccaagctcgatcacgacctgcgcgatttcgtattgagcggcgcggaactgccgcccgaacggcaggcagaactggcaaaactgcaaaccgaaggcgcgcaactttccgccaaattctcccaaaacgtcctagacgcgaccgacgcgttcggcatttactttgacgatgccgcaccgcttgccggcattcccgaagacgcgctcgccatgtttgccgccgccgcgcaaagcgaaggcaaaacaggttacaaaatcggcttgcagattccgcactaccttgccgttatccaatacgccggcaaccgcgaactgcgcgaacaaatctaccgcgcctacgttacccgtgccagcgaactttcaaacgacggcaaattcgacaacaccgccaacatcgaccgcacgctcgaaaacgcattgaaaaccgccaaactgctcggctttaaaaattacgccgaattgtcgctggcaaccaaaatggcggacacgcccgaacaggttttaaacttcctgcacgacctcgcccgccgcgccaaaccctacgccgaaaaagacctcgccgaagtcaaagccttcgcccgcgaacacctcggtctcgccgacccgcagccgtgggacttgagctacgccggcgaaaaactgcgcgaagccaaatacgcattcagcgaaaccgaagtcaaaaaatacttccccgtcggcaaagttctggcaggcctgttcgcccaaatcaaaaaactctacggcatcggattcgccgaaaaaaccgttcccgtctggcacaaagacgtgcgctattttgaattgcaacaaaacggcaaaaccatcggcggcgtttatatggatttgtacgcacgcgaaggcaaacgcggcggcgcgtggatgaacgactacaaaggccgccgccgctttgccgacggcacgctgcaactgcccaccgcctacctcgtctgcaacttcgccccgcccgtcggcggcaaagaagcgcgtttaagccacgacgaaatcctcaccctcttccacgaaaccggccacggactgcaccacctgcttacccaagtggacgaactgggcgtgtccggcatcaacggcgtaaaa

SEQ ID NO: 59 - protein, 491 aa, Neisseria gonorrhoeae
MIDNALLHLGEEPRFNQIKTEDIKPAVQTAIAEARGQIAAVKAQTHTGWANTVERLTGITERVGRIWGVVSHLNSVVDTPELRAVYNELMPEITVFFTEIGQDIELYNRFKTIKNSPEFATLSPAQKTKLDHDLRDFVLSGAELPPERQAELAKLQTEGAQLSAKFSQNVLDATDAFGIYFDDAAPLAGIPEDALAMFAAAAQSEGKTGYKIGLQIPHYLAVIQYAGNRELREQIYRAYVTRASELSNDGKFDNTANIDRTLENALKTAKLLGFKNYAELSLATKMADTPEQVLNFLHDLARRAKPYAEKDLAEVKAFAREHLGLADPQPWDLSYAGEKLREAKYAFSETEVKKYFPVGKVLAGLFAQIKKLYGIGFAEKTVPVWHKDVRYFELQQNGKTIGGVYMDLYAREGKRGGAWMNDYKGRRRFADGTLQLPTAYLVCNFAPPVGGKEARLSHDEILTLFHETGHGLHHLLTQVDELGVSGINGVK

SEQ ID NO: 60 - DNA, 2037 bp, Neisseria meningitidis; identical to SEQ ID NO: 54

SEQ ID NO: 61 - protein, 678 aa, Neisseria meningitidis; identical to SEQ ID NO: 55

SEQ ID NO: 62 - DNA, 534 bp, Neisseria meningitidis
atgtttccccccgacaaaacccttttcctctgtctcagcgcactgctcctcgcctcatgcggcacgacctccggcaaacaccgccaaccgaaacccaaacagacagtccggcaaatccaagccgtccgcatcagccacatcgaccgcacacaaggctcgcaggaactcatgctccacagcctcggactcatcggcacgccctacaaatggggcggcagcagcaccgcaaccggcttcgattgcagcggcatgattcaattcgtttacaaraacgccctcaacgtcaagctgccgcgcaccgcccgcgacatggcggcggcaagccgsaaaatccccgacagccgcytcaaggccggcgacctcgtattcttcaacaccggcggcgcacaccgctactcacacgtcggactctacatcggcaacggcgaattcatccatgcccccagcagcggcaaaaccatcaaaaccgaaaaactctccacaccgttttacgccaaaaactacctcggcgcacatactttttttacagaatga

SEQ ID NO: 63 - protein, 177 aa, Neisseria meningitidis
  VARIANT 116: Xaa = Any Amino Acid
MFPPDKTLFLCLSALLLASCGTTSGKHRQPKPKQTVRQIQAVRISHIDRTQGSQELMLHSLGLIGTPYKWGGSSTATGFDCSGMIQFVYKNALNVKLPRTARDMAAASRKIPDSRXKAGDLVFFNTGGAHRYSHVGLYIGNGEFIHAPSSGKTIKTEKLSTPFYAKNYLGAHTFFTE

SEQ ID NO: 64 - DNA, 534 bp, Neisseria gonorrhoeae
atgttttcccccgacaaaacccttttcctctgtctcggcgcactgctcctcgcctcatgcggcacgacctccggcaaacaccgccaaccgaaacccaaacagacagtccggcaaatccaagccgtccgcatcagccacatcggccgcacacaaggctcgcaggaactcatgctccacagcctcggactcatcggcacgccctacaaatggggcggcagcagcaccgcaaccggcttcgactgcagcggcatgattcaattggtttacaaaaacgccctcaacgtcaagctgccgcgcaccgcccgcgacatggcggcggcaagccgcaaaatccccgacagccgcctcaaggccggcgacatcgtattcttcaacaccggcggcgcacaccgctactcacacgtcggactctacatcggcaacggcgaattcatccatgcccccggcagcggcaaaaccatcaaaaccgaaaaactctccacaccgttttacgccaaaaactaccttggagcgcatacgttttttacagaatga

SEQ ID NO: 65 - protein, 177 aa, Neisseria gonorrhoeae
MFSPDKTLFLCLGALLLASCGTTSGKHRQPKPKQTVRQIQAVRISHIGRTQGSQELMLHSLGLIGTPYKWGGSSTATGFDCSGMIQLVYKNALNVKLPRTARDMAAASRKIPDSRLKAGDIVFFNTGGAHRYSHVGLYIGNGEFIHAPGSGKTIKTEKLSTPFYAKNYLGAHTFFTE

SEQ ID NO: 66 - DNA, 534 bp, Neisseria meningitidis
atgtttccccccgacaaaacccttttcctctgtctcagcgcactgctcctcgcctcatgcggcacgacctccggcaaacaccgccaaccgaaacccaaacagacagtccggcaaatccaagccgtccgcatcagccacatcgaccgcacacaaggctcgcaggaactcatgctccacagcctcggactcatcggcacgccctacaaatggggcggcagcagcaccgcaaccggcttcgattgcagcggcatgattcaattcgtttacaaaaacgccctcaacgtcaagctgccgcgcaccgcccgcgacatggcggcggcaagccgcaaaatccccgacagccgccttaaggccggcgacctcgtattcttcaacaccggcggcgcacaccgctactcacacgtcggactctatatcggcaacggcgaattcatccatgcccccagcagcggcaaaaccatcaaaaccgaaaaactctccacaccgttttacgccaaaaactacctcggcgcacatactttctttacagaatga

SEQ ID NO: 67 - protein, 177 aa, Neisseria meningitidis
MFPPDKTLFLCLSALLLASCGTTSGKHRQPKPKQTVRQIQAVRISHIDRTQGSQELMLHSLGLIGTPYKWGGSSTATGFDCSGMIQFVYKNALNVKLPRTARDMAAASRKIPDSRLKAGDLVFFNTGGAHRYSHVGLYIGNGEFIHAPSSGKTIKTEKLSTPFYAKNYLGAHTFFTE

SEQ ID NO: 68 - DNA, 1467 bp, Neisseria meningitidis
atgtttaaacgcagcgtaatcgcaatggcttgtatttttgccctttcagcctgcgggggcggcggtggcggatcgcccgatgtcaagtcggcggacacgctgtcaaaacctgccgcccctgttgtttctgaaaaagagacagaggcaaaggaagatgcgccacaggcaggttctcaaggacagggcgcgccatccgcacaaggcagtcaagatatggcggcggtttcggaagaaaatacaggcaatggcggtgcggtaacagcggataatcccaaaaatgaagacgaggtggcacaaaatgatatgccgcaaaatgccgccggtacagatagttcgacaccgaatcacaccccggatccgaatatgcttgccggaaatatggaaaatcaagcaacggatgccggggaatcgtctcagccggcaaaccaaccggatatggcaaatgcggcggacggaatgcagggggacgatccgtcggcaggcgggcaaaatgccggcaatacggctgcccaaggtgcaaatcaagccggaaacaatcaagccgccggttcttcagatcccatccccgcgtcaaaccctgcacctgcgaatggcggtagcaattttggaagggttgatttggctaatggcgttttgattgacgggccgtcgcaaaatataacgttgacccactgtaaaggcgattcttgtagtggcaataatttcttggatgaagaagtacagctaaaatcagaatttgaaaaattaagtgatgcagacaaaataagtaattacaagaaagatgggaagaatgataaatttgtcggtttggttgccgatagtgtgcagatgaagggaatcaatcaatatattatcttttataaacctaaacccacttcatttgcgcgatttaggcgttctgcacggtcgaggcggtcgcttccggccgagatgccgctgattcccgtcaatcaggcggatacgctgattgtcgatggggaagcggtcagcctgacggggcattccggcaatatcttcgcgcccgaagggaattaccggtatctgacttacggggcggaaaaattgcccggcggatcgtatgcccttcgtgttcaaggcgaaccggcaaaaggcgaaatgcttgcgggcgcggccgtgtacaacggcgaagtactgcatttccatacggaaaacggccgtccgtacccgaccaggggcaggtttgccgcaaaagtcgatttcggcagcaaatctgtggacggcattatcgacagcggcgatgatttgcatatgggtacgcaaaaattcaaagccgccatcgatggaaacggctttaaggggacttggacggaaaatggcagcggggatgtttccggaaagttttacggcccggccggcgaggaagtggcgggaaaatacagctatcgcccgacagatgcggaaaagggcggattcggcgtgtttgccggcaaaaaagagcaggattga

SEQ ID NO: 69 - protein, 488 aa, Neisseria meningitidis
MFKRSVIAMACIFALSACGGGGGGSPDVKSADTLSKPAAPVVSEKETEAKEDAPQAGSQGQGAPSAQGSQDMAAVSEENTGNGGAVTADNPKNEDEVAQNDMPQNAAGTDSSTPNHTPDPNMLAGNMENQATDAGESSQPANQPDMANAADGMQGDDPSAGGQNAGNTAAQGANQAGNNQAAGSSDPIPASNPAPANGGSNFGRVDLANGVLIDGPSQNITLTHCKGDSCSGNNFLDEEVQLKSEFEKLSDADKISNYKKDGKNDKFVGLVADSVQMKGINQYIIFYKPKPTSFARFRRSARSRRSLPAEMPLIPVNQADTLIVDGEAVSLTGHSGNIFAPEGNYRYLTYGAEKLPGGSYALRVQGEPAKGEMLAGAAVYNGEVLHFHTENGRPYPTRGRFAAKVDFGSKSVDGIIDSGDDLHMGTQKFKAAIDGNGFKGTWTENGSGDVSGKFYGPAGEEVAGKYSYRPTDAEKGGFGVFAGKKEQD

SEQ ID NO: 70 - DNA, 1290 bp, Neisseria gonorrhoeae
atgtttaaacgcagtgtgattgcaatggcttgtatttttcccctttcagcctgtgggggcggcggtggcggatcgcccgatgtcaagtcggcggacacgccgtcaaaaccggccgcccccgttgttgctgaaaatgccggggaaggggtgctgccgaaagaaaagaaagatgaggaggcagcgggcggtgcgccgcaagccgatacgcaggacgcaaccgccggagaaggcagccaagatatggcggcagtttcggcagaaaatacaggcaatggcggtgcggcaacaacggacaaccccaaaaatgaagacgcgggggcgcaaaatgatatgccgcaaaatgccgccgaatccgcaaatcaaacagggaacaaccaacccgccggttcttcagattccgcccccgcgtcaaaccctgcccctgcgaatggcggtagcgattttggaaggacgaacgtgggcaattctgttgtgattgacggaccgtcgcaaaatataacgttgacccactgtaaaggcgattcttgtaatggtgataatttattggatgaagaagcaccgtcaaaatcagaatttgaaaaattaagtgatgaagaaaaaattaagcgatataaaaaagacgagcaacgggagaattttgtcggtttggttgctgacagggtaaaaaaggatggaactaacaaatatatcatcttctatacggacaaaccacctactcgttctgcacggtcgaggaggtcgcttccggccgagattccgctgattcccgtcaatcaggccgatacgctgattgtggatggggaagcggtcagcctgacggggcattccggcaatatcttcgcgcccgaagggaattaccggtatctgacttacggggcggaaaaattgcccggcggatcgtatgccctccgtgtgcaaggcgaaccggcaaaaggcgaaatgcttgttggcacggccgtgtacaacggcgaagtgctgcatttccatatggaaaacggccgtccgtacccgtccggaggcaggtttgccgcaaaagtcgatttcggcagcaaatctgtggacggcattatcgacagcggcgatgatttgcatatgggtacgcaaaaattcaaagccgccatcgatggaaacggctttaaggggacttggacggaaaatggcggcggggatgtttccggaaggttttacggcccggccggcgaggaagtggcgggaaaatacagctatcgcccgacagatgctgaaaagggcggattcggcgtgtttgccggcaaaaaagatcgggattga

SEQ ID NO: 71 - protein, 429 aa, Neisseria gonorrhoeae
MFKRSVIAMACIFPLSACGGGGGGSPDVKSADTPSKPAAPVVAENAGEGVLPKEKKDEEAAGGAPQADTQDATAGEGSQDMAAVSAENTGNGGAATTDNPKNEDAGAQNDMPQNAAESANQTGNNQPAGSSDSAPASNPAPANGGSDFGRTNVGNSVVIDGPSQNITLTHCKGDSCNGDNLLDEEAPSKSEFEKLSDEEKIKRYKKDEQRENFVGLVADRVKKDGTNKYIIFYTDKPPTRSARSRRSLPAEIPLIPVNQADTLIVDGEAVSLTGHSGNIFAPEGNYRYLTYGAEKLPGGSYALRVQGEPAKGEMLVGTAVYNGEVLHFHMENGRPYPSGGRFAAKVDFGSKSVDGIIDSGDDLHMGTQKFKAAIDGNGFKGTWTENGGGDVSGRFYGPAGEEVAGKYSYRPTDAEKGGFGVFAGKKDRD

SEQ ID NO: 72 - DNA, 1494 bp, Neisseria meningitidis
atgtttaaacgcagtgtgattgcaatggcttgtattgttgccctttcagcctgtgggggcggcggtggcggatcgcccgatgttaagtcggcggacacgctgtcaaaacctgccgcccctgttgttactgaagatgtcggggaagaggtgctgccgaaagaaaagaaagatgaggaggcggtgagtggtgcgccgcaagccgatacgcaggacgcaaccgccggaaaaggcggtcaagatatggcggcagtttcggcagaaaatacaggcaatggcggtgcggcaacaacggataatcccgaaaataaagacgagggaccgcaaaatgatatgccgcaaaatgccgccgatacagatagttcgacaccgaatcacacccctgcaccgaatatgccaaccagagatatgggaaaccaagcaccggatgccggggaatcggcacaaccggcaaaccaaccggatatggcaaatgcggcggacggaatgcagggggacgatccgtcggcaggggaaaatgccggcaatacggcagatcaagctgcaaatcaagctgaaaacaatcaagtcggcggctctcaaaatcctgcctcttcaaccaatcctaacgccacgaatggcggcagcgattttggaaggataaatgtagctaatggcatcaagcttgacagcggttcggaaaatgtaacgttgacacattgtaaagacaaagtatgcgatagagatttcttagatgaagaagcaccaccaaaatcagaatttgaaaaattaagtgatgaagaaaaaattaataaatataaaaaagacgagcaacgagagaattttgtcggtttggttgctgacagggtagaaaagaatggaactaacaaatatgtcatcatttataaagacaagtccgcttcatcttcatctgcgcgattcaggcgttctgcacggtcgaggcggtcgcttccggccgagatgccgctgattcccgtcaatcaggcggatacgctgattgtcgatggggaagcggtcagcctgacggggcattccggcaatatcttcgcgcccgaagggaattaccggtatctgacttacggggcggaaaaattgtccggcggatcgtatgccctcagtgtgcaaggcgaaccggcaaaaggcgaaatgcttgcgggcacggccgtgtacaacggcgaagtgctgcatttccatatggaaaacggccgtccgtccccgtccggaggcaggtttgccgcaaaagtcgatttcggcagcaaatctgtggacggcattatcgacagcggcgatgatttgcatatgggtacgcaaaaattcaaagccgttatcgatggaaacggctttaaggggacttggacggaaaatggcggcggggatgtttccggaaggttttacggcccggccggcgaagaagtggcgggaaaatacagctatcgcccgacagatgcggaaaagggcggattcggcgtgtttgccggcaaaaaagagcaggattga

SEQ ID NO: 73 - protein, 497 aa, Neisseria meningitidis
MFKRSVIAMACIVALSACGGGGGGSPDVKSADTLSKPAAPVVTEDVGEEVLPKEKKDEEAVSGAPQADTQDATAGKGGQDMAAVSAENTGNGGAATTDNPENKDEGPQNDMPQNAADTDSSTPNHTPAPNMPTRDMGNQAPDAGESAQPANQPDMANAADGMQGDDPSAGENAGNTADQAANQAENNQVGGSQNPASSTNPNATNGGSDFGRINVANGIKLDSGSENVTLTHCKDKVCDRDFLDEEAPPKSEFEKLSDEEKINKYKKDEQRENFVGLVADRVEKNGTNKYVIIYKDKSASSSSARFRRSARSRRSLPAEMPLIPVNQADTLIVDGEAVSLTGHSGNIFAPEGNYRYLTYGAEKLSGGSYALSVQGEPAKGEMLAGTAVYNGEVLHFHMENGRPSPSGGRFAAKVDFGSKSVDGIIDSGDDLHMGTQKFKAVIDGNGFKGTWTENGGGDVSGRFYGPAGEEVAGKYSYRPTDAEKGGFGVFAGKKEQD

SEQ ID NO: 74 - DNA, 963 bp, Neisseria meningitidis
atgcaagcacggctgctgatacctattcttttttcagtttttattttatccgcctgcgggacactgacaggtattccatcgcatggcggaggtaaacgctttgcggtcgaacaagaacttgtggccgcttctgccagagctgccgttaaagacatggatttacaggcattacacggacgaaaagttgcattgtacattgccactatgggcgaccaaggttcaggcagtttgacagggggtcgctactccattgatgcactgattcgtggcgaatacataaacagccctgccgtccgtaccgattacacctatccacgttacgaaaccaccgctgaaacaacatcaggcggtttgacaggtttaaccacttctttatctacacttaatgcccctgcactctctcgcacccaatcagacggtagcggaagtaaaagcagtctgggcttaaatattggcgggatgggggattatcgaaatgaaaccttgacgactaacccgcgcgacactgcctttctttcccacttggtacagaccgtatttttcctgcgcggcatagacgttgtttctcctgccaatgccgatacagatgtgtttattaacatcgacgtattcggaacgatacgcaacagaaccgaaatgcacctatacaatgccgaaacactgaaagcccaaacaaaactggaatatttcgcagtagacagaaccaataaaaaattgctcatcaaaccaaaaaccaatgcgtttgaagctgcctataaagaaaattacgcattgtggatggggccgtataaagtaagcaaaggaattaaaccgacggaaggattaatggtcgatttctccgatatccgaccatacggcaatcatacgggtaactccgccccatccgtagaggctgataacagtcatgaggggtatggatacagcgatgaagtagtgcgacaacatagacaaggacaaccttga

SEQ ID NO: 75 - protein, 320 aa, Neisseria meningitidis
MQARLLIPILFSVFILSACGTLTGIPSHGGGKRFAVEQELVAASARAAVKDMDLQALHGRKVALYIATMGDQGSGSLTGGRYSIDALIRGEYINSPAVRTDYTYPRYETTAETTSGGLTGLTTSLSTLNAPALSRTQSDGSGSKSSLGLNIGGMGDYRNETLTTNPRDTAFLSHLVQTVFFLRGIDVVSPANADTDVFINIDVFGTIRNRTEMHLYNAETLKAQTKLEYFAVDRTNKKLLIKPKTNAFEAAYKENYALWMGPYKVSKGIKPTEGLMVDFSDIRPYGNHTGNSAPSVEADNSHEGYGYSDEVVRQHRQGQP

SEQ ID NO: 76 - DNA, 963 bp, Neisseria gonorrhoeae
atgcgggcacggctgctgatacctattcttttttcagtttttattttatccgcctgcgggacactgacaggtattccatcgcatggcggaggcaaacgcttcgcggtcgaacaagaacttgtggccgcttctgccagagctgccgttaaagacatggatttacaggcattacacggacgaaaagttgcattgtacattgcaactatgggcgaccaaggttcaggcagtttgacagggggtcgctactccattgatgcactgattcgcggcgaatacataaacagccctgccgtccgcaccgattacacctatccgcgttacgaaaccaccgctgaaacaacatcaggcggtttgacgggtttaaccacttctttatctacacttaatgcccctgcactctcgcgcacccaatcagacggtagcggaagtaggagcagtctgggcttaaatattggcgggatgggggattatcgaaatgaaaccttgacgaccaacccgcgcgacactgcctttctttcccacttggtgcagaccgtatttttcctgcgcggcatagacgttgtttctcctgccaatgccgatacagatgtgtttattaacatcgacgtattcggaacgatacgcaacagaaccgaaatgcacctatacaatgccgaaacactgaaagcccaaacaaaactggaatatttcgcagtagacagaaccaataaaaaattgctcatcaaacccaaaaccaatgcgtttgaagctgcctataaagaaaattacgcattgtggatggggccgtataaagtaagcaaaggaatcaaaccgacggaaggattgatggtcgatttctccgatatccaaccatacggcaatcatacgggtaactccgccccatccgtagaggctgataacagtcatgaggggtatggatacagcgatgaagcagtgcgacaacatagacaagggcaaccttga

SEQ ID NO: 77 - protein, 320 aa, Neisseria gonorrhoeae
MRARLLIPILFSVFILSACGTLTGIPSHGGGKRFAVEQELVAASARAAVKDMDLQALHGRKVALYIATMGDQGSGSLTGGRYSIDALIRGEYINSPAVRTDYTYPRYETTAETTSGGLTGLTTSLSTLNAPALSRTQSDGSGSRSSLGLNIGGMGDYRNETLTTNPRDTAFLSHLVQTVFFLRGIDVVSPANADTDVFINIDVFGTIRNRTEMHLYNAETLKAQTKLEYFAVDRTNKKLLIKPKTNAFEAAYKENYALWMGPYKVSKGIKPTEGLMVDFSDIQPYGNHTGNSAPSVEADNSHEGYGYSDEAVRQHRQGQP

SEQ ID NO: 78 - DNA, 963 bp, Neisseria meningitidis
atgcaagcacggctgctgatacctattcttttttcagtttttattttatccgcctgcgggacactgacaggtattccatcgcatggcggaggtaaacgcttcgcggtcgaacaagaacttgtggccgcttctgccagagctgccgttaaagacatggatttacaggcattacacggacgaaaagttgcattgtacattgcaactatgggcgaccaaggttcaggcagtttgacagggggtcgctactccattgatgcactgattcgtggcgaatacataaacagccctgccgtccgtaccgattacacctatccacgttacgaaaccaccgctgaaacaacatcaggcggtttgacaggtttaaccacttctttatctacacttaatgcccctgcactctcgcgcacccaatcagacggtagcggaagtaaaagcagtctgggcttaaatattggcgggatgggggattatcgaaatgaaaccttgacgactaacccgcgcgacactgcctttctttcccacttggtacagaccgtatttttcctgcgcggcatagacgttgtttctcctgccaatgccgatacggatgtgtttattaacatcgacgtattcggaacgatacgcaacagaaccgaaatgcacctatacaatgccgaaacactgaaagcccaaacaaaactggaatatttcgcagtagacagaaccaataaaaaattgctcatcaaaccaaaaaccaatgcgtttgaagctgcctataaagaaaattacgcattgtggatgggaccgtataaagtaagcaaaggaattaaaccgacagaaggattaatggtcgatttctccgatatccaaccatacggcaatcatatgggtaactctgccccatccgtagaggctgataacagtcatgaggggtatggatacagcgatgaagcagtgcgacgacatagacaagggcaaccttga

SEQ ID NO: 79 - protein, 320 aa, Neisseria meningitidis
MQARLLIPILFSVFILSACGTLTGIPSHGGGKRFAVEQELVAASARAAVKDMDLQALHGRKVALYIATMGDQGSGSLTGGRYSIDALIRGEYINSPAVRTDYTYPRYETTAETTSGGLTGLTTSLSTLNAPALSRTQSDGSGSKSSLGLNIGGMGDYRNETLTTNPRDTAFLSHLVQTVFFLRGIDVVSPANADTDVFINIDVFGTIRNRTEMHLYNAETLKAQTKLEYFAVDRTNKKLLIKPKTNAFEAAYKENYALWMGPYKVSKGIKPTEGLMVDFSDIQPYGNHMGNSAPSVEADNSHEGYGYSDEAVRRHRQGQP

SEQ ID NO: 80 - DNA, 606 bp, Neisseria meningitidis
atgaccatctatttcaaaaacggcttttacgacgacacattgggcggcatccccgaaggcgcggttgccgtccgcgccgaagaatacgccgcccttttggcaggacaggcgcagggcgggcagattgccgcagattccgacggccgccccgttttaaccccgccgcgcccgtccgattaccacgaatgggacggcaaaaaatggaaaatcagcaaagccgccgccgccgcccgtttcgccaaacaaaaaaccgccttggcattccgcctcgcggaaaaggcggacgaactcaaaaacagcctcttggcgggctatccccaagtggaaatcgacagcttttacaggcaggaaaaagaagccctcgcgcggcaggcggacaacaacgccccgaccccgatgctggcgcaaatcgccgccgcaaggggcgtggaattggacgttttgattgaaaaagttatcgaaaaatccgcccgcctggctgttgccgccggcgcgattatcggaaagcgtcagcagctcgaagacaaattgaacaccatcgaaaccgcgcccggattggacgcgctggaaaaggaaatcgaagaatggacgctaaacatcggctga

SEQ ID NO: 81 - protein, 201 aa, Neisseria meningitidis
MTIYFKNGFYDDTLGGIPEGAVAVRAEEYAALLAGQAQGGQIAADSDGRPVLTPPRPSDYHEWDGKKWKISKAAAAARFAKQKTALAFRLAEKADELKNSLLAGYPQVEIDSFYRQEKEALARQADNNAPTPMLAQIAAARGVELDVLIEKVIEKSARLAVAAGAIIGKRQQLEDKLNTIETAPGLDALEKEIEEWTLNIG

SEQ ID NO: 82 - DNA, 624 bp, Neisseria meningitidis
atgagaaaaccgaccgataccctacccgttaatctgcaacgccgccgcctgttgtgtgccgccggtgcgttgttgctcagtcctctggcgcacgccggcgcgcaacgtgaggaaacgcttgccgacgatgtggcttccgtgatgaggagttctgtcggcagcgtcaatccgccgaggctggtgtttgacaatccgaaagagggcgagcgttggttgtctgccatgtcggcacgtttggcaaggttcgtccccgaggaggaggagcggcgcaggctgctggtcaatatccagtacgaaagcagccgggccggtttggatacgcagattgtgttggggctgattgaggtggaaagcgcgttccgccagtatgcaatcagcggtgtcggcgcgcgcggcctgatgcaggttatgccgttttggaaaaactacatcggcaaaccggcgcacaacctgttcgacatccgcaccaacctgcgttacggctgtaccatcctgcgccattaccggaatcttgaaaaaggcaacatcgtccgcgcgcttgcccgctttaacggcagcttgggcagcaataaatatccgaacgccgttttgggcgcgtggcgcaaccgctggcagtggcgttga

SEQ ID NO: 83 - protein, 207 aa, Neisseria meningitidis
MRKPTDTLPVNLQRRRLLCAAGALLLSPLAHAGAQREETLADDVASVMRSSVGSVNPPRLVFDNPKEGERWLSAMSARLARFVPEEEERRRLLVNIQYESSRAGLDTQIVLGLIEVESAFRQYAISGVGARGLMQVMPFWKNYIGKPAHNLFDIRTNLRYGCTILRHYRNLEKGNIVRALARFNGSLGSNKYPNAVLGAWRNRWQWR

SEQ ID NO: 84 - DNA, 564 bp, Neisseria meningitidis
atgaaaaaaatcatcttcgccgcactcgcagccgccgccatcagtactgcctccgccgccacctacaaagtggacgaatatcacgccaacgcccgtttcgccatcgaccatttcaacaccagcaccaacgtcggcggtttttacggtctgaccggttccgtcgagttcgaccaagcaaaacgcgacggtaaaatcgacatcaccatccccattgccaacctgcaaagcggttcgcaacactttaccgaccacctgaaatcagccgacatcttcgatgccgcccaatatccggacatccgctttgtttccaccaaattcaacttcaacggcaaaaaactggtttccgttgacggcaacctgaccatgcacggcaaaaccgcccccgtcaaactcaaagccgaaaaattcaactgctaccaaagcccgatggagaaaaccgaagtttgtggcggcgacttcagcaccaccatcgaccgcaccaaatggggcatggactacctcgttaacgttggtatgaccaaaagcgtccgcatcgacatccaaatcgaggcagccaaacaataa

SEQ ID NO: 85 - protein, 187 aa, Neisseria meningitidis
MKKIIFAALAAAAISTASAATYKVDEYHANARFAIDHFNTSTNVGGFYGLTGSVEFDQAKRDGKIDITIPIANLQSGSQHFTDHLKSADIFDAAQYPDIRFVSTKFNFNGKKLVSVDGNLTMHGKTAPVKLKAEKFNCYQSPMEKTEVCGGDFSTTIDRTKWGMDYLVNVGMTKSVRIDIQIEAAKQ

SEQ ID NO: 86 - DNA, 4374 bp, Neisseria meningitidis
atgaaaacaaccgacaaacggacaaccgaaacacaccgcaaagccccgaaaaccggccgcatccgcttctcgcctgcttacttagccatatgcctgtcgttcggcattcttccccaagcctgggcgggacacacttatttcggcatcaactaccaatactatcgcgactttgccgaaaataaaggcaagtttgcagtcggggcgaaagatattgaggtttacaacaaaaaaggggagttggtcggcaaatcaatgacaaaagccccgatgattgatttttctgtggtgtcgcgtaacggcgtggcggcattggtgggcgatcaatatattgtgagcgtggcacataacggcggctataacaacgttgattttggtgcggaaggaagaaatcccgatcaacatcgttttacttataaaattgtgaaacggaataattataaagcagggactaaaggccatccttatggcggcgattatcatatgccgcgtttgcataaatttgtcacagatgcagaacctgttgaaatgaccagttatatggatgggcggaaatatatcgatcaaaataattaccctgaccgtgttcgtattggggcaggcaggcaatattggcgatctgatgaagatgagcccaataaccgcgaaagttcatatcatattgcaagtgcgtattcttggctcgttggtggcaatacctttgcacaaaatggatcaggtggtggcacagtcaacttaggtagtgaaaaaattaaacatagcccatatggttttttaccaacaggaggctcatttggcgacagtggctcaccaatgtttatctatgatgcccaaaagcaaaagtggttaattaatggggtattgcaaacgggcaacccctatataggaaaaagcaatggcttccagctggttcgtaaagattggttctatgatgaaatctttgctggagatacccattcagtattctacgaaccacgtcaaaatgggaaatactcttttaacgacgataataatggcacaggaaaaatcaatgccaaacatgaacacaattctctgcctaatagattaaaaacacgaaccgttcaattgtttaatgtttctttatccgagacagcaagagaacctgtttatcatgctgcaggtggtgtcaacagttatcgacccagactgaataatggagaaaatatttcctttattgacgaaggaaaaggcgaattgatacttaccagcaacatcaatcaaggtgctggaggattatatttccaaggagattttacggtctcgcctgaaaataacgaaacttggcaaggcgcgggcgttcatatcagtgaagacagtaccgttacttggaaagtaaacggcgtggcaaacgaccgcctgtccaaaatcggcaaaggcacgctgcacgttcaagccaaaggggaaaaccaaggctcgatcagcgtgggcgacggtacagtcattttggatcagcaggcagacgataaaggcaaaaaacaagcctttagtgaaatcggcttggtcagcggcaggggtacggtgcaactgaatgccgataatcagttcaaccccgacaaactctatttcggctttcgcggcggacgtttggatttaaacgggcattcgctttcgttccaccgtattcaaaataccgatgaaggggcgatgattgtcaaccacaatcaagacaaagaatccaccgttaccattacaggcaataaagatattgctacaaccggcaataacaacagcttggatagcaaaaaagaaattgcctacaacggttggtttggcgagaaagatacgaccaaaacgaacgggcggctcaaccttgtttaccagcccgccgcagaagaccgcaccctgctgctttccggcggaacaaatttaaacggcaacatcacgcaaacaaacggcaaactgtttttcagcggcagaccaacaccgcacgcctacaatcatttaaacgaccattggtcgcaaaaagagggcattcctcgcggggaaatcgtgtgggacaacgactggatcaaccgcacatttaaagcggaaaacttccaaattaaaggcggacaggcggtggtttcccgcaatgttgccaaagtgaaaggcgattggcatttgagcaatcacgcccaagcagtttttggtgtcgcaccgcatcaaagccacacaatctgtacacgttcggactggacgggtctgacaaattgtgtcgaaaaaaccattaccgacgataaagtgattgcttcattgactaagaccgacatcagcggcaatgtcgatcttgccgatcacgctcatttaaatctcacagggcttgccacactcaacggcaatcttagtgcaaatggcgatacacgttatacagtcagccacaacgccacccaaaacggcaaccttagcctcgtgggcaatgcccaagcaacatttaatcaagccacattaaacggcaacacatcggcttcgggcaatgcttcatttaatctaagcgaccacgccgtacaaaacggcagtctgacgctttccggcaacgctaaggcaaacgtaagccattccgcactcaacggtaatgtctccctagccgataaggcagtattccattttgaaagcagccgctttaccggacaaatcagcggcggcaaggatacggcattacacttaaaagacagcgaatggacgctgccgtcaggcacggaattaggcaatttaaaccttgacaacgccaccattacactcaattccgcctatcgccacgatgcggcaggggcgcaaaccggcagtgcgacagatgcgccgcgccgccgttcgcgccgttcgcgccgttccctattatccgttacaccgccaacttcggtagaatcccgtttcaacacgctgacggtaaacggcaaattgaacggtcagggaacattccgctttatgtcggaactcttcggctaccgcagcgacaaattgaagctggcggaaagttccgaaggcacttacaccttggcggtcaacaataccggcaacgaacctgcaagcctcgaacaattgacggtagtggaaggaaaagacaacaaaccgctgtccgaaaaccttaatttcaccctgcaaaacgaacacgtcgatgccggcgcgtggcgttaccaactcatccgcaaagacggcgagttccgcctgcataatccggtcaaagaacaagagctttccgacaaactcggcaaggcagaagccaaaaaacaggcggaaaaagacaacgcgcaaagccttgacgcgctgattgcggccgggcgcgatgccgtcgaaaagacagaaagcgttgccgaaccggcccggcaggcaggcggggaaaatgtcggcattatgcaggcggaggaagagaaaaaacgggtgcaggcggataaagacaccgccttggcgaaacagcgcgaagcggaaacccggccggctaccaccgccttcccccgcgcccgccgcgcccgccgggatttgccgcaactgcaaccccaaccgcagccccaaccgcagcgcgacctgatcagccgttatgccaatagcggtttgagtgaattttccgccacgctcaacagcgttttcgccgtacaggacgaattagaccgcgtatttgccgaagaccgccgcaacgccgtttggacaagcggcatccgggacaccaaacactaccgttcgcaagatttccgcgcctaccgccaacaaaccgacctgcgccaaatcggtatgcagaaaaacctcggcagcgggcgcgtcggcatcctgttttcgcacaaccggaccgaaaacaccttcgacgacggcatcggcaactcggcacggcttgcccacggcgccgttttcgggcaatacggcatcgacaggttctacatcggcatcagcgcgggcgcgggttttagcagcggcagcctttcagacggcatcggaggcaaaatccgccgccgcgtgctgcattacggcattcaggcacgataccgcgccggtttcggcggattcggcatcgaaccgcacatcggcgcaacgcgctatttcgtccaaaaagcggattaccgctacgaaaacgtcaatatcgccacccccggccttgcattcaaccgctaccgcgcgggcattaaggcagattattcattcaaaccggcgcaacacatttccatcacgccttatttgagcctgtcctataccgatgccgcttcgggcaaagtccgaacacgcgtcaataccgccgtattggctcaggatttcggcaaaacccgcagtgcggaatggggcgtaaacgccgaaatcaaaggtttcacgctgtccctccacgctgccgccgccaaaggcccgcaactggaagcgcaacacagcgcgggcatcaaattaggctaccgctggtaa

SEQ ID NO: 87 - protein, 1457 aa, Neisseria meningitidis
MKTTDKRTTETHRKAPKTGRIRFSPAYLAICLSFGILPQAWAGHTYFGINYQYYRDFAENKGKFAVGAKDIEVYNKKGELVGKSMTKAPMIDFSVVSRNGVAALVGDQYIVSVAHNGGYNNVDFGAEGRNPDQHRFTYKIVKRNNYKAGTKGHPYGGDYHMPRLHKFVTDAEPVEMTSYMDGRKYIDQNNYPDRVRIGAGRQYWRSDEDEPNNRESSYHIASAYSWLVGGNTFAQNGSGGGTVNLGSEKIKHSPYGFLPTGGSFGDSGSPMFIYDAQKQKWLINGVLQTGNPYIGKSNGFQLVRKDWFYDEIFAGDTHSVFYEPRQNGKYSFNDDNNGTGKINAKHEHNSLPNRLKTRTVQLFNVSLSETAREPVYHAAGGVNSYRPRLNNGENISFIDEGKGELILTSNINQGAGGLYFQGDFTVSPENNETWQGAGVHISEDSTVTWKVNGVANDRLSKIGKGTLHVQAKGENQGSISVGDGTVILDQQADDKGKKQAFSEIGLVSGRGTVQLNADNQFNPDKLYFGFRGGRLDLNGHSLSFHRIQNTDEGAMIVNHNQDKESTVTITGNKDIATTGNNNSLDSKKEIAYNGWFGEKDTTKTNGRLNLVYQPAAEDRTLLLSGGTNLNGNITQTNGKLFFSGRPTPHAYNHLNDHWSQKEGIPRGEIVWDNDWINRTFKAENFQIKGGQAVVSRNVAKVKGDWHLSNHAQAVFGVAPHQSHTICTRSDWTGLTNCVEKTITDDKVIASLTKTDISGNVDLADHAHLNLTGLATLNGNLSANGDTRYTVSHNATQNGNLSLVGNAQATFNQATLNGNTSASGNASFNLSDHAVQNGSLTLSGNAKANVSHSALNGNVSLADKAVFHFESSRFTGQISGGKDTALHLKDSEWTLPSGTELGNLNLDNATITLNSAYRHDAAGAQTGSATDAPRRRSRRSRRSLLSVTPPTSVESRFNTLTVNGKLNGQGTFRFMSELFGYRSDKLKLAESSEGTYTLAVNNTGNEPASLEQLTVVEGKDNKPLSENLNFTLQNEHVDAGAWRYQLIRKDGEFRLHNPVKEQELSDKLGKAEAKKQAEKDNAQSLDALIAAGRDAVEKTESVAEPARQAGGENVGIMQAEEEKKRVQADKDTALAKQREAETRPATTAFPRARRARRDLPQLQPQPQPQPQRDLISRYANSGLSEFSATLNSVFAVQDELDRVFAEDRRNAVWTSGIRDTKHYRSQDFRAYRQQTDLRQIGMQKNLGSGRVGILFSHNRTENTFDDGIGNSARLAHGAVFGQYGIDRFYIGISAGAGFSSGSLSDGIGGKIRRRVLHYGIQARYRAGFGGFGIEPHIGATRYFVQKADYRYENVNIATPGLAFNRYRAGIKADYSFKPAQHISITPYLSLSYTDAASGKVRTRVNTAVLAQDFGKTRSAEWGVNAEIKGFTLSLHAAAAKGPQLEAQHSAGIKLGYRW

SEQ ID NO: 88 - DNA, 1827 bp, Neisseria meningitidis
ttgggcatttcccgcaaaatatcccttattctgtccatactggcagtgtgcctgccgatgcatgcacacgcctcagatttggcaaacgattcttttatccggcaggttctcgaccgtcagcatttcgaacccgacgggaaataccacctattcggcagcaggggggaacttgccgagcgcagcggccatatcggattgggaaaaatacaaagccatcagttgggcaacctgatgattcaacaggcggccattaaaggaaatatcggctacattgtccgcttttccgatcacgggcacgaagtccattcccccttcgacaaccatgcctcacattccgattctgatgaagccggtagtcccgttgacggatttagcctttaccgcatccattgggacggatacgaacaccatcccgccgacggctatgacgggccacagggcggcggctatcccgctcccaaaggcgcgagggatatatacagctacgacataaaaggcgttgcccaaaatatccgcctcaacctgaccgacaaccgcagcaccggacaacggcttgccgaccgtttccacaatgccggtagtatgctgacgcaaggagtaggcgacggattcaaacgcgccacccgatacagccccgagctggacagatcgggcaatgccgccgaagccttcaacggcactgcagatatcgttaaaaacatcatcggcgcggcaggagaaattgtcggcgcaggcgatgccgtgcagggcataagcgaaggctcaaacattgctgtcatgcacggcttgggtctgctttccaccgaaaacaagatggcgcgcatcaacgatttggcagatatggcgcaactcaaagactatgccgcagcagccatccgcgattgggcagtccaaaaccccaatgccgcacaaggcatagaagccgtcagcaatatctttatggcagccatccccatcaaagggattggagctgttcggggaaaatacggcttgggcggcatcacggcacatcctatcaagcggtcgcagatgggcgcgatcgcattgccgaaagggaaatccgccgtcagcgacaattttgccgatgcggcatacgccaaatacccgtccccttaccattcccgaaatatccgttcaaacttggagcagcgttacggcaaagaaaacatcacctcctcaaccgtgccgccgtcaaacggcaaaaatgtcaaactggcagaccaacgccacccgaagacaggcgtaccgtttgacggtaaagggtttccgaattttgagaagcacgtgaaatatgatacgaagctcgatattcaagaattatcggggggcggtatacctaaggctaagcctgtgtttgatgcgaaaccgagatgggaggttgataggaagcttaataaattgacaactcgtgagcaggtggagaaaaatgttcaggaaataaggaacggtaatataaacagtaactttagccaacatgctcaactagagagggaaattaataaactaaaatctgccgatgaaattaattttgcagatggaatgggaaaatttaccgatagcatgaatgacaaggcttttagtaggcttgtgaaatcagttaaagagaatggcttcacaaatccagttgtggagtacgttgaaataaatggaaaagcatatatcgtaagaggaaataatrgggtttttgctgcagaataccttggcaggatacatgaattaaaatttaaaaaagttgactttcctgttcctaatactagttggaaaaatcctactgatgtcttgaatgaatcaggtaatgttaagagacctcgttataggagtaaataa

SEQ ID NO: 89 - protein, 608 aa, Neisseria meningitidis
LGISRKISLILSILAVCLPMHAHASDLANDSFIRQVLDRQHFEPDGKYHLFGSRGELAERSGHIGLGKIQSHQLGNLMIQQAAIKGNIGYIVRFSDHGHEVHSPFDNHASHSDSDEAGSPVDGFSLYRIHWDGYEHHPADGYDGPQGGGYPAPKGARDIYSYDIKGVAQNIRLNLTDNRSTGQRLADRFHNAGSMLTQGVGDGFKRATRYSPELDRSGNAAEAFNGTADIVKNIIGAAGEIVGAGDAVQGISEGSNIAVMHGLGLLSTENKMARINDLADMAQLKDYAAAAIRDWAVQNPNAAQGIEAVSNIFMAAIPIKGIGAVRGKYGLGGITAHPIKRSQMGAIALPKGKSAVSDNFADAAYAKYPSPYHSRNIRSNLEQRYGKENITSSTVPPSNGKNVKLADQRHPKTGVPFDGKGFPNFEKHVKYDTKLDIQELSGGGIPKAKPVFDAKPRWEVDRKLNKLTTREQVEKNVQEIRNGNINSNFSQHAQLEREINKLKSADEINFADGMGKFTDSMNDKAFSRLVKSVKENGFTNPVVEYVEINGKAYIVRGNNRVFAAEYLGRIHELKFKKVDFPVPNTSWKNPTDVLNESGNVKRPRYRSK

SEQ ID NO: 90 - DNA, 33 bp, Artificial Sequence
  PCR primer
cgcggatcccatatgttgcctgcaatcacgatt

SEQ ID NO: 91 - DNA, 28 bp, Artificial Sequence
  PCR primer
cccgctcgagtttagaagcgggcggcaa

SEQ ID NO: 92 - DNA, 34 bp, Artificial Sequence
  PCR primer
cgcggatcccatatgttcaaatcctttgtcgtca

SEQ ID NO: 93 - DNA, 27 bp, Artificial Sequence
  PCR primer
cccgctcgagtttggcggttttgctgc

SEQ ID NO: 94 - DNA, 30 bp, Artificial Sequence
  PCR primer
cgcggatcccatatggccgcccccgcatct

SEQ ID NO: 95 - DNA, 31 bp, Artificial Sequence
  PCR primer
cccgctcgagatttacttttttgatgtcgac

SEQ ID NO: 96 - DNA, 33 bp, Artificial Sequence
  PCR primer
cgcggatcccatatgtgccaaagcaagagcatc

SEQ ID NO: 97 - DNA, 25 bp, Artificial Sequence
  PCR primer
cccgctcgagcgggcggtattcggg

SEQ ID NO: 98 - DNA, 32 bp, Artificial Sequence
  PCR primer
cgcggatcccatatggaaacacagctttacat

SEQ ID NO: 99 - DNA, 29 bp, Artificial Sequence
  PCR primer
cccgctcgagataataatatcccgcgccc

SEQ ID NO: 100 - DNA, 29 bp, Artificial Sequence
  PCR primer
cgcggatcccatatgactgacaacgcact

SEQ ID NO: 101 - DNA, 26 bp, Artificial Sequence
  PCR primer
cccgctcgaggaccgcgttgtcgaaa

SEQ ID NO: 102 - DNA, 31 bp, Artificial Sequence
  PCR primer
cgcggatcccatatgaaacaccgccaaccga

SEQ ID NO: 103 - DNA, 31 bp, Artificial Sequence
  PCR primer
cccgctcgagttctgtaaaaaaagtatgtgc

SEQ ID NO: 104 - DNA, 32 bp, Artificial Sequence
  PCR primer
ccggaattctagctagcctttcagcctgcggg

SEQ ID NO: 105 - DNA, 28 bp, Artificial Sequence
  PCR primer
cccgctcgagatcctgctcttttttgcc

SEQ ID NO: 106 - DNA, 31 bp, Artificial Sequence
  PCR primer
cgcggatcccatatgtgcgggacactgacag

SEQ ID NO: 107 - DNA, 28 bp, Artificial Sequence
  PCR primer
cccgctcgagaggttgtccttgtctatg

SEQ ID NO: 108 - DNA, 15 bp, Artificial Sequence
  PCR Primer
cgcggatcccatatg

SEQ ID NO: 109 - DNA, 15 bp, Artificial Sequence
  PCR Primer
cgcggatccgctagc

SEQ ID NO: 110 - DNA, 17 bp, Artificial Sequence
  PCR Primer
ccggaattctagctagc

SEQ ID NO: 111 - DNA, 10 bp, Artificial Sequence
  PCR Primer
cccgctcgag

SEQ ID NO: 112 - DNA, 20 bp, Artificial Sequence
  PCR Primer
ggaattccatatggccatgg

SEQ ID NO: 113 - DNA, 8 bp, Artificial Sequence
  PCR Primer
cgggatcc

SEQ ID NO: 114 - DNA, 17 bp, Artificial Sequence
  PCR Primer
gatcagctagccatatg

SEQ ID NO: 115 - DNA, 8 bp, Artificial Sequence
  PCR Primer
cgggatcc
